(19) United States
(12) Patent Application Publication
(10) Pub. No.: US 2024/0376462 A1
(43) Pub. Date: Nov. 14, 2024

(54) ENGINEERED CLASS 2 TYPE V CRISPR SYSTEMS

(71) Applicant: Scribe Therapeutics Inc., Alameda, CA (US)

(72) Inventors: Gayathri VIJAYAKUMAR, Oakland, CA (US); Sean HIGGINS, Alameda, CA (US); Isabel COLIN, Oakland, CA (US); Sarah DENNY, San Francisco, CA (US); Brett T. STAAHL, Tiburon, CA (US); Benjamin OAKES, El Cerrito, CA (US); Angus SIDORE, Oakland, CA (US); Suraj MAKHIJA, San Francisco, CA (US)

(21) Appl. No.: 18/789,158

(22) Filed: Jul. 30, 2024

Related U.S. Application Data
(62) Division of application No. 17/572,208, filed on Jan. 10, 2022.
Application No. 17/572,208 is a continuation of application No. PCT/US2021/061673, filed on Dec. 2, 2021.
(60) Provisional application No. 63/208,855, filed on Jun. 9, 2021.
(60) Provisional application No. 63/162,346, filed on Mar. 17, 2021.
(60) Provisional application No. 63/121,196, filed on Dec. 3, 2020.

(51) Int. Cl. C12N 15/10; C12N 9/22; C12N 15/11; C12N 15/113; C12N 15/85; C12N 15/86; C12N 15/90

(52) U.S. Cl. CPC C12N 15/102; C12N 9/22; C12N 15/11; C12N 15/111; C12N 15/113; C12N 15/85; C12N 15/86; C12N 15/907; C12N 2310/20; C12N 2320/50; C12N 2750/14143; C12N 2800/80

(57) ABSTRACT

Provided herein are engineered Class 2, Type V nucleases and guide RNAs useful for the editing of target nucleic acids. Also provided are methods of making and using such variants to modify nucleic acids.

### CROSS-REFERENCE TO RELATED APPLICATIONS

[0001] This application is a continuation of International Patent Application No. PCT/US2021/061673, filed Dec. 2, 2021, which claims priority to U.S. Provisional Patent Application Nos. 63/121,196, filed Dec. 3, 2020, 63/162,346, filed on Mar. 17, 2021, and 63/208,855, filed Jun. 9, 2021, the contents of each of which are incorporated by reference in their entireties.

### INCORPORATION BY REFERENCE OF SEQUENCE LISTING

[0002] The contents of the text file submitted electronically herewith are incorporated herein by reference in their entirety: A computer readable format copy of the Sequence Listing (filename: SCRB_031_03US_SeqList_ST25, date recorded: Jan. 3, 2022, file size 5.61 megabytes).

### BACKGROUND

[0003] The CRISPR-Cas systems of bacteria and archaea confer a form of acquired immunity against phage and viruses. Intensive research over the past decade has uncovered the biochemistry of these systems. CRISPR-Cas systems consist of Cas proteins, which are involved in acquisition, targeting and cleavage of foreign DNA or RNA, and a CRISPR array, which includes direct repeats flanking short spacer sequences that guide Cas proteins to their targets. Class 2 CRISPR-Cas are streamlined versions in which a single Cas protein bound to RNA is responsible for binding to and cleavage of a targeted sequence. The programmable nature of these minimal systems has facilitated their use as a versatile technology that is revolutionizing the field of genome manipulation.

[0004] To date, only a few Class 2 CRISPR/Cas systems have been discovered that have been widely used. Of these, Type V are unique in that they utilize a single unified RuvC-like endonuclease (RuvC) domain that recognizes 5′ PAM sequences that are different from the 3′ PAM sequences recognized by Cas9, and form a staggered cleavage in the target nucleic acid with 5, 7, or 10 nt 5′ overhangs (Yang et al., PAM-dependent target DNA recognition and cleavage by C2c1 CRISPR-Cas endonuclease. Cell 167:1814 (2016)). However, Type V wild-type Cas and guide sequences have low editing efficiency. Thus, there is a need in the art for additional Class 2, Type V CRISPR/Cas systems (e.g., Cas protein plus guide RNA combinations) that have been optimized and/or offer improvements over earlier generation systems for utilization in a variety of therapeutic, diagnostic, and research applications.

### SUMMARY

[0005] The present disclosure relates to guide ribonucleic acids (gRNA), engineered Class 2, Type V CRISPR proteins, and systems of engineered Class 2, Type V CRISPR proteins and guide ribonucleic acids (gRNA) used to modify a target nucleic acid of a gene in eukaryotic cells. In some embodiments, the present disclosure provides engineered Class 2, Type V proteins comprising one or more modifications relative to a domain of the reference CasX and exhibits one or more improved characteristics as compared to the reference CasX protein of SEQ ID NO: 2. In other embodiments, the present disclosure provides engineered sequence variants of a CasX variant protein, such as CasX 491 (SEQ ID NO: 336) or CasX 515 (SEQ ID NO: 416), wherein the Class 2, Type V protein comprises at least one modification relative to a domain of the CasX variant and exhibits one or more improved characteristics as compared to the CasX variant protein. In some embodiments, the Class 2, Type V variant is capable of forming a complex with a guide ribonucleic acid (gRNA), wherein the complex can bind and cleave a target nucleic acid, wherein the target nucleic acid comprises a non-target strand and a target strand.

[0006] In some embodiments, the present disclosure provides guide ribonucleic acids (gRNAs), including single-guide compositions, capable of binding a Class 2, Type V variant protein, wherein the gRNA comprises at least one modification in a region compared to the gRNA of SEQ ID NO: 2238 or SEQ ID NO: 2239. In some embodiments, the modified regions of the scaffold of the gRNA include: (a) an extended stem loop; (b) a scaffold stem loop; (c) a triplex; and (d) pseudoknot. In some cases, the scaffold extended stem of the variant gRNA further comprises a modification to the bubble. In other cases, the scaffold of the gRNA further comprises a modification to the triplex loop region. In other cases, the scaffold of the variant gRNA further comprises a heterologous RNA in the extended stem, including hairpin sequences.

[0007] In some embodiments, the present disclosure provides gene editing pairs comprising the engineered Class 2, Type V proteins and gRNA variants of any of the embodiments described herein, wherein the gene editing pair exhibits at least one improved characteristic as compared to a gene editing pair comprising a reference CasX protein of SEQ ID NO:1, SEQ ID NO:2, or SEQ ID NO:3 and a gRNA of SEQ ID NO: 4 or SEQ ID NO: 5. In a particular embodiment, the engineered Class 2, Type V protein comprises a sequence selected from the group consisting of the sequences of SEQ ID NOS: 247-592 and 1147-1231 as set forth in Table 3, or a sequence having at least about 85%, at least about 90%, or at least about 95%, or at least about 95%, or at least about 96%, or at least about 97%, or at least about 98%, or at least about 99% sequence identity thereto and the gRNA is a sequence selected from the group consisting of the sequences of SEQ ID NOS: 2101-2332 and 2353-2398 as set forth in Table 2, or a sequence having at least about 85%, at least about 90%, or at least about 95%, or at least about 95%, or at least about 96%, or at least about 97%, or at least about 98%, or at least about 99% sequence identity thereto. In a particular embodiment, the engineered Class 2, Type V protein comprises a sequence selected from the group consisting of the sequences of SEQ ID NOS: 270-592 and 1147-1231, or a sequence having at least about 85%, at least about 90%, or at least about 95%, or at least about 95%, or at least about 96%, or at least about 97%, or at least about 98%, or at least about 99% sequence identity thereto and the gRNA is a sequence selected from the group consisting of the sequences of SEQ ID NOS: 2238-2332 and 2353-2398, or a sequence having at least about 85%, at least about 90%, or at least about 95%, or at least about 95%, or at least about 96%, or at least about 97%, or at least about 98%, or at least about 99% sequence identity thereto. In a particular embodiment, the engineered Class 2, Type V protein comprises a sequence selected from the group consisting of the sequences of SEQ ID NOS: 415-592 and 1147-1231, or a sequence having at least about 85%, at least about 90%, or at least about 95%, or at least about 95%, or at least about 96%, or at least about 97%, or at least about 98%, or at least about 99% sequence identity thereto and the gRNA is a sequence selected from the group consisting of the sequences of SEQ ID NOS: 2281-2332 and 2353-2398, or a sequence having at least about 85%, at least about 90%, or at least about 95%, or at least about 95%, or at least about 96%, or at least about 97%, or at least about 98%, or at least about 99% sequence identity thereto.

[0008] In some embodiments, the present disclosure provides polynucleotides and vectors encoding the engineered Class 2, Type V variant proteins, gRNA variants and gene editing pairs described herein. In some embodiments, the vectors are viral vectors such as an Adeno-Associated Viral (AAV) vector. In other embodiments, the vectors are CasX delivery particles termed XDP that comprise RNPs of the gene editing pairs.

[0009] In some embodiments, the present disclosure provides cells comprising the polynucleotides, vectors, engineered Class 2, Type V proteins and gRNAs described herein. In other embodiments, the present disclosure provides cells comprising target nucleic acid edited by the methods of editing embodiments described herein.

[0010] In some embodiments, the present disclosure provides kits comprising the polynucleotides, vectors, engineered Class 2, Type V proteins, gRNAs and gene editing pairs described herein.

[0011] In some embodiments, the present disclosure provides methods of editing a target nucleic acid, comprising contacting the target nucleic acid with the Class 2, Type V protein and the gRNA variant described herein, wherein the contacting results in editing or modification of the target nucleic acid.

[0012] In some embodiments, the present disclosure provides methods of editing a target nucleic acid in a population of cells, comprising contacting the cells with one or more of the gene editing pairs described herein, wherein the contacting results in editing or modification of the target nucleic acid in the population of cells.

[0013] In other embodiments, the disclosure provides methods of treatment of a subject in need thereof, comprising administration of the gene editing pairs or vectors comprising or encoding the gene editing pairs of any of the embodiments described herein.

[0014] In another aspect, provided herein are gene editing pairs, compositions comprising gene editing pairs, or vectors comprising or encoding gene editing pairs, for use as a medicament.

[0015] In another aspect, provided herein are gene editing pairs, compositions comprising gene editing pairs, or vectors comprising or encoding gene editing pairs, for use in a method of treatment, wherein the method comprises editing or modifying a target nucleic acid; optionally wherein the editing occurs in a subject having a mutation in an allele of a gene wherein the mutation causes a disease or disorder in the subject, preferably wherein the editing changes the mutation to a wild type allele of the gene or knocks down or knocks out an allele of a gene causing a disease or disorder in the subject.

### INCORPORATION BY REFERENCE

[0016] All publications, patents, and patent applications mentioned in this specification are herein incorporated by reference to the same extent as if each individual publication, patent, or patent application was specifically and individually indicated to be incorporated by reference. The contents of WO 2020/247882, WO 2020/247883, and WO 2021/113772, which disclose CasX variants and gRNA variants, and methods of delivering same, are hereby incorporated by reference in their entirety.

### BRIEF DESCRIPTION OF THE DRAWINGS

[0017] The novel features of the invention are set forth with particularity in the appended claims. A better understanding of the features and advantages of the present invention will be obtained by reference to the following detailed description that sets forth illustrative embodiments, in which the principles of the invention are utilized, and the accompanying drawings of which:

[0018] FIG. 1 is a graph of the results of an assay for the quantification of active fractions of RNP formed by sgRNA174 (SEQ ID NO: 2238) and the CasX variants 119, 457, 488 and 491, as described in Example 8. Sequences corresponding to sgRNAs and CasX variants are provided in Tables 2 and 3, respectively. Equimolar amounts of RNP and target were co-incubated and the amount of cleaved target was determined at the indicated timepoints. Mean and standard deviation of three independent replicates are shown for each timepoint. The biphasic fit of the combined replicates is shown. “2” refers to the reference CasX protein of SEQ ID NO: 2.

[0019] FIG. 2 shows the quantification of active fractions of RNP formed by CasX2 (reference CasX protein of SEQ ID NO: 2) and the modified sgRNAs, as described in Example 8. Equimolar amounts of RNP and target were co-incubated and the amount of cleaved target was determined at the indicated timepoints. Mean and standard deviation of three independent replicates are shown for each timepoint. The biphasic fit of the combined replicates is shown.

[0020] FIG. 3 shows the quantification of active fractions of RNP formed by CasX 491 and the modified sgRNAs under guide-limiting conditions, as described in Example 8. Equimolar amounts of RNP and target were co-incubated and the amount of cleaved target was determined at the indicated timepoints. The biphasic fit of the data is shown.

[0021] FIG. 4 shows the quantification of cleavage rates of RNP formed by sgRNA174 and the CasX variants, as described in Example 8. Target DNA was incubated with a 20-fold excess of the indicated RNP and the amount of cleaved target was determined at the indicated time points. Mean and standard deviation of three independent replicates are shown for each timepoint, except for 488 and 491 where a single replicate is shown. The monophasic fit of the combined replicates is shown.

[0022] FIG. 5 shows the quantification of cleavage rates of RNP formed by CasX2 and the sgRNA variants, as described in Example 8. Target DNA was incubated with a 20-fold excess of the indicated RNP and the amount of cleaved target was determined at the indicated time points. Mean and standard deviation of three independent replicates are shown for each timepoint. The monophasic fit of the combined replicates is shown.

[0023] FIG. 6 shows the quantification of initial velocities of RNP formed by CasX2 and the sgRNA variants, as described in Example 8. The first two time-points of the previous cleavage experiment were fit with a linear model to determine the initial cleavage velocity.

[0024] FIG. 7 shows the quantification of cleavage rates of RNP formed by CasX491 and the sgRNA variants, as described in Example 8. Target DNA was incubated with a 20-fold excess of the indicated RNP at 10° C. and the amount of cleaved target was determined at the indicated time points. The monophasic fit of the timepoints is shown.

[0025] FIG. 8 shows the quantification of competent fractions of RNP of CasX variant 515 and 526 complexed with gRNA variant 174 compared to RNP of reference CasX 2 complexed with gRNA 2 using equimolar amounts of indicated RNP and a complementary target, as described in Example 8. The biphasic fit for each time course or set of combined replicates is shown.

[0026] FIG. 9 shows the quantification of cleavage rates of RNP of CasX variant 515 and 526 complexed with gRNA variant 174 compared to RNP of reference CasX 2 complexed with gRNA 2 using with a 20-fold excess of the indicated RNP, as described in Example 8.

[0027] FIG. 10A shows the quantification of cleavage rates of CasX variants on TTC PAM, as described in Example 5. Target DNA substrates with identical spacers and the indicated PAM sequence were incubated with a 20-fold excess of the indicated RNP at 37° C. and the amount of cleaved target was determined at the indicated time points. Monophasic fit of a single replicate is shown.

[0028] FIG. 10B shows the quantification of cleavage rates of CasX variants on CTC PAM, as described in Example 5. Target DNA substrates with identical spacers and the indicated PAM sequence were incubated with a 20-fold excess of the indicated RNP at 37° C. and the amount of cleaved target was determined at the indicated time points. Monophasic fit of a single replicate is shown.

[0029] FIG. 10C shows the quantification of cleavage rates of CasX variants on GTC PAM, as described in Example 5. Target DNA substrates with identical spacers and the indicated PAM sequence were incubated with a 20-fold excess of the indicated RNP at 37° C. and the amount of cleaved target was determined at the indicated time points. Monophasic fit of a single replicate is shown.

[0030] FIG. 10D shows the quantification of cleavage rates of CasX variants on ATC PAM, as described in Example 5. Target DNA substrates with identical spacers and the indicated PAM sequence were incubated with a 20-fold excess of the indicated RNP at 37° C. and the amount of cleaved target was determined at the indicated time points. Monophasic fit of a single replicate is shown.

[0031] FIG. 11A shows the quantification of cleavage rates of RNP of CasX variant 491 and guide 174 on NTC PAMs, as described in Example 5. Timepoints were taken over the course of 2 minutes and the fraction cleaved was graphed for each target and timepoint, but only the first two minutes of the time course are shown for clarity.

[0032] FIG. 11B shows the quantification of cleavage rates of RNP of CasX variant 491 and guide 174 on NTT PAMs, as described in Example 5. Timepoints were taken over the course of 10 minutes and the fraction cleaved was graphed for each target and timepoint.

[0033] FIG. 12A shows the quantification of cleavage by RNP formed by sgRNA174 and the CasX variants 515 using spacer lengths of 18, 19, or 20 nucleotides, as described in Example 9. Target DNA was incubated with a 20-fold excess of the indicated RNP and the amount of cleaved target was determined at the indicated time points. Mean and standard deviation of three independent replicates are shown for each timepoint. The monophasic fit of the combined replicates is shown.

[0034] FIG. 12B shows the quantification of cleavage by RNP formed by sgRNA174 and the CasX variant 526 using spacer lengths of 18, 19, or 20 nucleotides, as described in Example 9. Target DNA was incubated with a 20-fold excess of the indicated RNP and the amount of cleaved target was determined at the indicated time points. Mean and standard deviation of three independent replicates are shown for each timepoint. The monophasic fit of the combined replicates is shown.

[0035] FIG. 13 is a schematic showing an example of CasX protein and scaffold DNA sequence for packaging in adeno-associated virus (AAV). The DNA segment between the AAV inverted terminal repeats (ITRs), comprised of a CasX-encoding DNA and its promoter, and scaffold-encoding DNA and its promoter gets packaged within an AAV capsid during AAV production.

[0036] FIG. 14 shows the results of an editing assay comparing gRNA scaffolds 229-237 to scaffold 174 in mouse neural progenitor cells (mNPC) isolated from the Ai9-tdtomato transgenic mice, as described in Example 21. Cells were nucleofected with the indicated doses of p59 plasmids encoding CasX 491, the scaffold, and spacer 11.30 (5′ AAGGGGCUCCGCACCACGCC 3′, SEQ ID NO: 17) targeting mRHO. Editing at the mRHO locus was assessed 5 days post-transfection by NGS, and show that editing with constructs with scaffolds 230, 231, 234 and 235 demonstrated greater editing compared to constructs with scaffold 174 at both doses.

[0037] FIG. 15 shows the results of an editing assay comparing gRNA scaffolds 229-237 to scaffold 174 in mNPC cells, as described in Example 21. Cells were nucleofected with the indicated doses of p59 plasmids encoding CasX 491, the scaffold, and spacer 12.7 (5′ CUGCAUUCUAGUUGUGGUUU 3′, SEQ ID NO: 1146) targeting repeat elements preventing expression of the tdTomato fluorescent protein. Editing was assessed 5 days post-transfection by FACS, to quantify the fraction of tdTomato positive cells. Cells nucleofected with scaffolds 231-235 displayed approximately 35% greater editing compared to constructs with scaffold 174 at the high dose, and approximately 25% greater editing at the low dose.

[0038] FIG. 16 is a diagram showing an exemplary method of making CasX protein and guide RNA variants of the disclosure using Deep Mutational Evolution (DME). In some exemplary embodiments, DME builds and tests nearly every possible mutation, insertion and deletion in a biomolecule and combinations/multiples thereof, and provides a near comprehensive and unbiased assessment of the fitness landscape of a biomolecule and paths in sequence space towards desired outcomes. As described herein, DME can be applied to both CasX protein and guide RNA.

[0039] FIG. 17A depicts the CryoEM structure of Deltaproteobacteria CasX protein:sgRNA RNP complex (PDB id: 6YN2), including two stem loops, a pseudoknot, and a triplex, as described in Example 13.

[0040] FIG. 17B depicts the secondary structure of the sgRNA of SEQ ID NO: 4 identified from the structure shown in (A) using the tool RNAPDBee 2.0 (rnapdbee.cs.put.poznan.p1/, using the tools 3DNA/DSSR, and using the VARNA visualization tool). RNA regions are indicated. Residues that were not evident in the PDB crystal structure file are indicated by plain-text letters (i.e., not encircled), and are not included in residue numbering.

[0041] FIG. 18 is a schematic of the regions and domains of a guide RNA used to design a scaffold library, as described in Example 13.

[0042] FIG. 19 is a pie chart of the relative distribution and design of the scaffold library with both unbiased (double and single mutations) and targeted mutations (towards the triplex, scaffold stem bubble, pseudoknot, and extended stem and loop) indicated, as described in Example 13.

[0043] FIG. 20 is a schematic of the triplex mutagenesis designed to specifically incorporate alternate triplex-forming base pairs into the triplex, as described in Example 13. Solid lines indicate the Watson-Crick pair in the triplex; the third strand nucleotide is indicated as a dotted line representing the non-canonical interaction with the purine of the duplex. In the library, each of the 5 locations indicated was replaced with all possible triplex motifs (G:GC, T:AT, G:GC)=243 sequences. Sequence of ACUGGCGCUUUUAUCUGAUUACUUUGAGAGCCAUCANNNAUCAAAG (SEQ ID NO: 1022).

[0044] FIG. 21 is a bar chart with results of the enrichment values of reference guide scaffolds 174 and 175 in each screen, as described in Example 13.

[0045] FIG. 22 are scatterplots showing the log 2 enrichment value for each measured single nucleotide substitution, deletion, or insertion, as measured in each of two independent screens of the mutant libraries for guide scaffolds 174 and 175, as described in Example 13.

[0046] FIG. 23 are heat maps for single mutants in guide scaffolds 174 and 175 showing specific mutable regions in the scaffold across the sequences, as described in Example 13. Yellow shades reflect values with similar enrichment to the reference scaffolds; red shades indicate an increase in enrichment, and thus activity, relative to the reference scaffold; blue shades indicate a loss of activity relative to the wildtype scaffold; white indicates missing data (or a substitution that would result in wildtype sequence.

[0047] FIG. 24 is a scatterplot that compares the log₂ enrichment of single nucleotide mutations on reference guide scaffolds 174 and 175, as described in Example 13. Only those mutations to positions that were analogous between 174 and 175 are shown. Results suggest that, overall, guide scaffold 174 is more tolerant to changes than 175.

[0048] FIG. 25 is a bar chart showing the average (and 95% confidence interval) log 2 enrichment values for a set of scaffolds in which the pseudoknot pairs have been shuffled, such that each new pseudoknot has the same composition of base pairs, but in a different order within the stem, as described in Example 13. Each bar represents a set of scaffolds with the G:A (or A:G) pair location indicated (see diagram at right). 291 pseudoknot stems were tested; numbers above bars indicate the number of stems with the G:A (or A:G) pair at each position.

[0049] FIG. 26 is a schematic of the pseudoknot sequence of FIGS. 55 and 56, given 5′ to 3′, with the two strand sequences separated by an underscore.

[0050] FIG. 27 is a bar chart showing the average (and 95% confidence interval) log 2 enrichment values for scaffolds, divided by the predicted secondary structure stability of the pseudoknot stem region, as described in Example 13. Scaffolds with very stable stems (e.g., ΔG <−7 kcal/mol) had high enrichment values on average, whereas scaffolds with destabilized stems (ΔG >−5 kcal/mol) had low enrichment values on average.

[0051] FIG. 28 is a heat map of all double mutants of positions 7 and 29 in scaffold 175, as described in Example 13. The pseudoknot sequence is given 5′ to 3′, on the right.

[0052] FIG. 29A show editing results in ARPE-19 nucleofected cells using engineered guide 235 compared to 174 with the 11.1 spacer targeting the P23 site of Rho locus (with CasX 491), demonstrating improved activity by the 235 variant, with increased on-target activity at WT exogenous RHO without off-target cleavage at the mutant RHO reporter gene (by the non-targeting spacer), as described in Example 21.

[0053] FIG. 29B is a bar graph displaying fold-change in editing levels of p59.491.235.11.1 normalized to benchmark p59.491.174.11.1 levels (set to value 1.0) in ARPE-1 cells nucleofected with 1000 ng of each plasmid, as described in Example 21.

[0054] FIG. 30 shows the results of an editing assay comparing Cas nucleases 2,119,491, 515, 527, 528, 529, 530, and 531 in a custom HEK293 cell line, PASS_V1.01, as described in Example 17. Cells were lipofected with 2 μg of p67 plasmid encoding the indicated Cas protein. After five days, cell genomic DNA was extracted. PCR amplification and Next-Generation Sequencing was performed to isolate and quantify the fraction of edited cells at custom designed on-target editing sites. For each sample, editing was evaluated at target sites (individual points) consisting of the following PAM sequences: 48 TTC, 14 ATC, 22 CTC, 11 GTC individual sites, and percent editing was normalized to a vehicle control. Cells lipofected with any nuclease displayed higher mean editing at TTC PAM target sites (horizontal bar) than that of the wild-type nuclease Cas 2, except Cas 528. The relative preference of any given nuclease for the four different PAM sequences is also represented by the violin plots. In particular, Cas nucleases 527, 528, and 529 exhibit substantially different PAM preferences than that of the wild-type nuclease Cas 2.

[0055] FIG. 31 shows the results of an editing assay comparing improved Cas nuclease 491 to improved nucleases 532 and 533 in a custom HEK293 cell line, PASS_V1.01, as described in Example 18. Cells were lipofected, in duplicate, with 2 μg of p67 plasmid encoding the indicated Cas protein and a puromycin resistance gene, and grown under puromycin selection. After three days, cell genomic DNA was extracted. PCR amplification and Next-Generation Sequencing was performed to isolate and quantify the fraction of edited cells at custom designed on-target editing sites. For each sample, editing was evaluated at target sites consisting of the following PAM sequences: 48 TTC, 14 ATC, 22 CTC, 11 GTC individual sites, and fraction editing was normalized to a vehicle control. Cells lipofected with Cas 532 or 533 displayed higher mean editing than Cas 491 at each of the PAM sequences, with the exception of Cas 533 at TTC PAM target sites. Error bars represent standard error of the mean for n=2 biological samples

[0056] FIG. 32 is a graph of a survival assay to determine the selective stringency of the CcdB selection to different spacers when targeted by CasX protein 515 and Scaffold 174, as described in Example 14.

[0057] FIGS. 33A-E are heat maps of variants of CasX 515 demonstrating neutral or improved biochemical cleavage for each mutant at a TTC PAM target site as an average of three spacers, as described in Example 14. The figures show the results across the full length of the CasX 515 sequence.

[0058] FIGS. 34A-E are heat maps of variants of CasX 515 demonstrating neutral or improved biochemical cleavage for each mutant at a CTC PAM target site as an average of three biological replicates at a single spacer, as described in Example 14. The figures show the results across the full length of the CasX 515 sequence.

[0059] FIGS. 35A-E are heat maps of variants of CasX 515 demonstrating neutral or improved biochemical cleavage for each mutant at a CTC PAM target site as an average of three biological replicates at a single spacer, as described in Example 14. The figures show the results across the full length of the CasX 515 sequence.

[0060] FIGS. 36A-E are heat maps of variants of CasX 515 demonstrating neutral or improved biochemical cleavage for each mutant at an ATC PAM target site as an average of three biological replicates at a single spacer, as described in Example 14. The figures show the results across the full length of the CasX 515 sequence.

[0061] FIG. 37A is a graph showing the effects of spacer length on ability to edit target nucleic acid with RNPs in Jurkat cells, as described in Example 15, for spacer 15.3.

[0062] FIG. 37B is a graph showing the effects of spacer length on ability to edit target nucleic acid with RNPs in Jurkat cells, as described in Example 15, for spacer 15.5.

[0063] FIG. 38 is a bar plot of select CasX variant proteins and their editing efficiency at four different PAM sequences (TTC, ATC, CTC and GTC) for duplicate samples, as described in Example 16. Data are presented as percent editing +/−SD.

[0064] FIG. 39 is a bar plot showing the average editing efficiency relative to CasX 491 of select CasX nucleases at 48 different TTC PAM target sites, as described in Example 19. The propagated standard error of the mean of two experiments plotted as error bars. Asterisks indicate significant difference between CasX 527 and CasX 491 (p=0.0000635 by Welch's two-tailed t-test).

[0065] FIG. 40 is a diagram based on the published CryoEM structure of the homologous reference CasX 1 (SEQ ID NO: 1; Protein Data Bank Identification Number: 6NY2) showing the physical locations of the target DNA PAM sequence, the PAM interacting loop, the NTSB domain, and amino acid position 26, as described in Example 19.

[0066] FIG. 41 is a violin plot of select CasX variant proteins and their editing efficiency at 48 TTC PAM target sites as described in Example 19.

[0067] FIG. 42 is a bar plot of select CasX variant proteins and their editing efficiency relative to CasX 491 at 48 TTC PAM target sites, as described in Example 19. Data are presented as average relative editing efficiency where 1.0 is equal CasX 491 editing. The grey dashed line illustrates the editing efficiency of CasX 119. Error is +/−the propagated SEM for duplicate samples.

[0068] FIG. 43 is a bar plot showing the average editing efficiency relative to CasX 491 as well as the average Specificity ratio of select CasX nucleases, as described in Example 20.

[0069] FIG. 44 is a flow-chart illustrating the qualitative relationship between tested combinations of mutations and their effect on both activity and specificity of the resulting CasX variants, as described in Example 21.

[0070] FIG. 45A show the results of AAV-mediated editing assays comparing gRNA scaffold 235 to scaffold 174 and guide 11.30 and 11.31 at the endogenous mouse Rho exon 1 locus in mNPCs over a range of MOI, as described in Example 21.

[0071] FIG. 45B shows the editing results as fold-change in editing levels for scaffold 235 relative to guide 174 (set to 1.0) with spacer 11.30 in cells infected at a 5.0e+5 MOI, as described in Example 21.

[0072] FIG. 46 is a schematic showing the modifications made in the extended stem loop in gRNA variant 175 that were incorporated into gRNA variant 235. sgRNA 175 extended stem loop: SEQ ID NO: 1285; sgRNA 325 extended stem loop: SEQ ID NO: 1286.

[0073] FIG. 47 is a schematic of gRNA variant 235, indicated the modifications in the triplex, the scaffold stem bubble, and the extended stem loop, relative to gRNA variants 174 and 175. Pseudoknot and triplex loop: SEQ ID NO: 1287; scaffold stem and extended stem: SEQ ID NO: 1288.

[0074] FIG. 48 is a schematic illustrating the positions of the bases within the MS2 hairpin, as described in Example 23. MS2 sequence in figure: SEQ ID NO: 1289.

[0075] FIG. 49 is a graph of percent editing at the tdTomato locus measured by tdTomato fluorescence for XDPs packaged with the indicated scaffold variants, with gRNA scaffold 188 and 251 serving as base variants, as described in Example 23. Two MS2 versions (MS2 353 and MS2 WT) were used.

[0076] FIG. 50 shows the improvements in EC50 values, determined using the NanoSight, for editing at the tdTomato locus in NPCs, relative to titers, for XDPs packaged with the indicated gRNA scaffold variants, with Scaffold 188 and 251 serving as base controls, as described in Example 23. Two MS2 versions, MS2 353 and MS2 wild type (WT), were used.

[0077] FIG. 51 shows the correlation between MS2 hairpin affinity (K_{D}) and EC50 for XDPs packaged with the depicted gRNA scaffold variants, as described in Example 23.

[0078] FIG. 52 shows the correlation between MS2 hairpin affinity (K_{D}) and titer for XDPs packaged with the depicted gRNA scaffold variants, as described in Example 23.

### DETAILED DESCRIPTION

[0079] While preferred embodiments of the present invention have been shown and described herein, it will be obvious to those skilled in the art that such embodiments are provided by way of example only. Numerous variations, changes, and substitutions will now occur to those skilled in the art without departing from the invention. It should be understood that various alternatives to the embodiments of the invention described herein may be employed in practicing the invention. It is intended that the following claims define the scope of the invention and that methods and structures within the scope of these claims and their equivalents be covered thereby.

[0080] Unless otherwise defined, all technical and scientific terms used herein have the same meaning as commonly understood by one of ordinary skill in the art to which this invention belongs. Although methods and materials similar or equivalent to those described herein can be used in the practice or testing of the present embodiments, suitable methods and materials are described below. In case of conflict, the patent specification, including definitions, will control. In addition, the materials, methods, and examples are illustrative only and not intended to be limiting. Numerous variations, changes, and substitutions will now occur to those skilled in the art without departing from the invention.

### Definitions

[0081] The terms “polynucleotide” and “nucleic acid,” used interchangeably herein, refer to a polymeric form of nucleotides of any length, either ribonucleotides or deoxyribonucleotides. Thus, terms “polynucleotide” and “nucleic acid” encompass single-stranded DNA; double-stranded DNA; multi-stranded DNA; single-stranded RNA; double-stranded RNA; multi-stranded RNA; genomic DNA; cDNA; DNA-RNA hybrids; and a polymer comprising purine and pyrimidine bases or other natural, chemically or biochemically modified, non-natural, or derivatized nucleotide bases.

[0082] “Hybridizable” or “complementary” are used interchangeably to mean that a nucleic acid (e.g., RNA, DNA) comprises a sequence of nucleotides that enables it to non-covalently bind, i.e., form Watson-Crick base pairs and/or G/U base pairs, “anneal”, or “hybridize,” to another nucleic acid in a sequence-specific, antiparallel, manner (i.e., a nucleic acid specifically binds to a complementary nucleic acid) under the appropriate in vitro and/or in vivo conditions of temperature and solution ionic strength. It is understood that the sequence of a polynucleotide need not be 100% complementary to that of its target nucleic acid sequence to be specifically hybridizable; it can have at least about 70%, at least about 80%, or at least about 90%, or at least about 95% sequence identity and still hybridize to the target nucleic acid sequence. Moreover, a polynucleotide may hybridize over one or more segments such that intervening or adjacent segments are not involved in the hybridization event (e.g., a loop structure or hairpin structure, a ‘bulge’, ‘bubble’ and the like).

[0083] A “gene,” for the purposes of the present disclosure, includes a DNA region encoding a gene product (e.g., a protein, RNA), as well as all DNA regions which regulate the production of the gene product, whether or not such regulatory sequences are adjacent to coding and/or transcribed sequences. Accordingly, a gene may include accessory element sequences including, but not necessarily limited to, promoter sequences, terminators, translational regulatory sequences such as ribosome binding sites and internal ribosome entry sites, enhancers, silencers, insulators, boundary elements, replication origins, matrix attachment sites and locus control regions. Coding sequences encode a gene product upon transcription or transcription and translation; the coding sequences of the disclosure may comprise fragments and need not contain a full-length open reading frame. A gene can include both the strand that is transcribed as well as the complementary strand containing the anticodons.

[0084] The term “downstream” refers to a nucleotide sequence that is located 3′ to a reference nucleotide sequence. In certain embodiments, downstream nucleotide sequences relate to sequences that follow the starting point of transcription. For example, the translation initiation codon of a gene is located downstream of the start site of transcription.

[0085] The term “upstream” refers to a nucleotide sequence that is located 5′ to a reference nucleotide sequence. In certain embodiments, upstream nucleotide sequences relate to sequences that are located on the 5′ side of a coding region or starting point of transcription. For example, most promoters are located upstream of the start site of transcription.

[0086] The term “adjacent to” with respect to polynucleotide or amino acid sequences refers to sequences that are next to, or adjoining each other in a polynucleotide or polypeptide. The skilled artisan will appreciate that two sequences can be considered to be adjacent to each other and still encompass a limited amount of intervening sequence, e.g., 1, 2, 3, 4, 5, 6, 7, 8, 9 or 10 nucleotides or amino acids.

[0087] The term “accessory element” is used interchangeably herein with the term “accessory sequence,” and is intended to include, inter alia, polyadenylation signals (poly(A) signal), enhancer elements, introns, posttranscriptional regulatory elements (PTREs), nuclear localization signals (NLS), deaminases, DNA glycosylase inhibitors, additional promoters, factors that stimulate CRISPR-mediated homology-directed repair (e.g. in cis or in trans), activators or repressors of transcription, self-cleaving sequences, and fusion domains, for example a fusion domain fused to a CRISPR protein. It will be understood that the choice of the appropriate accessory element or elements will depend on the encoded component to be expressed (e.g., protein or RNA) or whether the nucleic acid comprises multiple components that require different polymerases or are not intended to be expressed as a fusion protein.

[0088] The term “promoter” refers to a DNA sequence that contains a transcription start site and additional sequences to facilitate polymerase binding and transcription. Exemplary eukaryotic promoters include elements such as a TATA box, and/or B recognition element (BRE) and assists or promotes the transcription and expression of an associated transcribable polynucleotide sequence and/or gene (or transgene). A promoter can be synthetically produced or can be derived from a known or naturally occurring promoter sequence or another promoter sequence. A promoter can be proximal or distal to the gene to be transcribed. A promoter can also include a chimeric promoter comprising a combination of two or more heterologous sequences to confer certain properties. A promoter of the present disclosure can include variants of promoter sequences that are similar in composition, but not identical to, other promoter sequence(s) known or provided herein. A promoter can be classified according to criteria relating to the pattern of expression of an associated coding or transcribable sequence or gene operably linked to the promoter, such as constitutive, developmental, tissue-specific, inducible, etc. A promoter can also be classified according to its strength. As used in the context of a promoter, “strength” refers to the rate of transcription of the gene controlled by the promoter. A “strong” promoter means the rate of transcription is high, while a “weak” promoter means the rate of transcription is relatively low.

[0089] A promoter of the disclosure can be a Polymerase II (Pol II) promoter. Polymerase II transcribes all protein coding and many non-coding genes. A representative Pol II promoter includes a core promoter, which is a sequence of about 100 base pairs surrounding the transcription start site, and serves as a binding platform for the Pol II polymerase and associated general transcription factors. The promoter may contain one or more core promoter elements such as the TATA box, BRE, Initiator (INR), motif ten element (MTE), downstream core promoter element (DPE), downstream core element (DCE), although core promoters lacking these elements are known in the art.

[0090] A promoter of the disclosure can be a Polymerase III (Pol III) promoter. Pol III transcribes DNA to synthesize small ribosomal RNAs such as the 5S rRNA, tRNAs, and other small RNAs. Representative Pol III promoters use internal control sequences (sequences within the transcribed section of the gene) to support transcription, although upstream elements such as the TATA box are also sometimes used. All Pol III promoters are envisaged as within the scope of the instant disclosure.

[0091] The term “enhancer” refers to regulatory DNA sequences that, when bound by specific proteins called transcription factors, regulate the expression of an associated gene. Enhancers may be located in the intron of the gene, or 5′ or 3′ of the coding sequence of the gene. Enhancers may be proximal to the gene (i.e., within a few tens or hundreds of base pairs (bp) of the promoter), or may be located distal to the gene (i.e., thousands of bp, hundreds of thousands of bp, or even millions of bp away from the promoter). A single gene may be regulated by more than one enhancer, all of which are envisaged as within the scope of the instant disclosure.

[0092] As used herein, a “post-transcriptional regulatory element (PRE),” such as a hepatitis PRE, refers to a DNA sequence that, when transcribed creates a tertiary structure capable of exhibiting post-transcriptional activity to enhance or promote expression of an associated gene operably linked thereto.

[0093] As used herein, a “post-transcriptional regulatory element (PTRE),” such as a hepatitis PTRE, refers to a DNA sequence that, when transcribed creates a tertiary structure capable of exhibiting post-transcriptional activity to enhance or promote expression of an associated gene operably linked thereto.

[0094] “Recombinant,” as used herein, means that a particular nucleic acid (DNA or RNA) is the product of various combinations of cloning, restriction, and/or ligation steps resulting in a construct having a structural coding or non-coding sequence distinguishable from endogenous nucleic acids found in natural systems. Generally, DNA sequences encoding the structural coding sequence can be assembled from cDNA fragments and short oligonucleotide linkers, or from a series of synthetic oligonucleotides, to provide a synthetic nucleic acid which is capable of being expressed from a recombinant transcriptional unit contained in a cell or in a cell-free transcription and translation system. Such sequences can be provided in the form of an open reading frame uninterrupted by internal non-translated sequences, or introns, which are typically present in eukaryotic genes. Genomic DNA comprising the relevant sequences can also be used in the formation of a recombinant gene or transcriptional unit. Sequences of non-translated DNA may be present 5′ or 3′ from the open reading frame, where such sequences do not interfere with manipulation or expression of the coding regions, and may indeed act to modulate production of a desired product by various mechanisms (see “enhancers” and “promoters”, above).

[0095] The term “recombinant polynucleotide” or “recombinant nucleic acid” refers to one which is not naturally occurring, e.g., is made by the artificial combination of two otherwise separated segments of sequence through human intervention. This artificial combination is often accomplished by either chemical synthesis means, or by the artificial manipulation of isolated segments of nucleic acids, e.g., by genetic engineering techniques. Such is usually done to replace a codon with a redundant codon encoding the same or a conservative amino acid, while typically introducing or removing a sequence recognition site. Alternatively, it is performed to join together nucleic acid segments of desired functions to generate a desired combination of functions. This artificial combination is often accomplished by either chemical synthesis means, or by the artificial manipulation of isolated segments of nucleic acids, e.g., by genetic engineering techniques.

[0096] Similarly, the term “recombinant polypeptide” or “recombinant protein” refers to a polypeptide or protein which is not naturally occurring, e.g., is made by the artificial combination of two otherwise separated segments of amino sequence through human intervention. Thus, e.g., a protein that comprises a heterologous amino acid sequence is recombinant.

[0097] As used herein, the term “contacting” means establishing a physical connection between two or more entities. For example, contacting a target nucleic acid with a guide nucleic acid means that the target nucleic acid and the guide nucleic acid are made to share a physical connection; e.g., can hybridize if the sequences share sequence similarity.

[0098] “Dissociation constant”, or “K_{d}”, are used interchangeably and mean the affinity between a ligand “L” and a protein “P”; i.e., how tightly a ligand binds to a particular protein. It can be calculated using the formula K_{d}=[L] [P]/[LP], where [P], [L] and [LP] represent molar concentrations of the protein, ligand and complex, respectively.

[0099] The disclosure provides systems and methods useful for editing a target nucleic acid sequence. As used herein “editing” is used interchangeably with “modifying” and includes but is not limited to cleaving, nicking, deleting, knocking in, knocking out, and the like.

[0100] By “cleavage” it is meant the breakage of the covalent backbone of a target nucleic acid molecule (e.g., RNA, DNA). Cleavage can be initiated by a variety of methods including, but not limited to, enzymatic or chemical hydrolysis of a phosphodiester bond. Both single-stranded cleavage and double-stranded cleavage are possible, and double-stranded cleavage can occur as a result of two distinct single-stranded cleavage events.

[0101] The term “knock-out” refers to the elimination of a gene or the expression of a gene. For example, a gene can be knocked out by either a deletion or an addition of a nucleotide sequence that leads to a disruption of the reading frame. As another example, a gene may be knocked out by replacing a part of the gene with an irrelevant sequence. The term “knock-down” as used herein refers to reduction in the expression of a gene or its gene product(s). As a result of a gene knock-down, the protein activity or function may be attenuated or the protein levels may be reduced or eliminated.

[0102] As used herein, “homology-directed repair” (HDR) refers to the form of DNA repair that takes place during repair of double-strand breaks in cells. This process requires nucleotide sequence homology, and uses a donor template to repair or knock-out a target DNA, and leads to the transfer of genetic information from the donor to the target. Homology-directed repair can result in an alteration of the sequence of the target sequence by insertion, deletion, or mutation if the donor template differs from the target DNA sequence and part or all of the sequence of the donor template is incorporated into the target DNA.

[0103] As used herein, “non-homologous end joining” (NHEJ) refers to the repair of double-strand breaks in DNA by direct ligation of the break ends to one another without the need for a homologous template (in contrast to homology-directed repair, which requires a homologous sequence to guide repair). NHEJ often results in the loss (deletion) of nucleotide sequence near the site of the double-strand break.

[0104] As used herein “micro-homology mediated end joining” (MMEJ) refers to a mutagenic DSB repair mechanism, which always associates with deletions flanking the break sites without the need for a homologous template (in contrast to homology-directed repair, which requires a homologous sequence to guide repair). MMEJ often results in the loss (deletion) of nucleotide sequence near the site of the double-strand break. A polynucleotide or polypeptide has a certain percent “sequence similarity” or “sequence identity” to another polynucleotide or polypeptide, meaning that, when aligned, that percentage of bases or amino acids are the same, and in the same relative position, when comparing the two sequences. Sequence similarity (sometimes referred to as percent similarity, percent identity, or homology) can be determined in a number of different manners. To determine sequence similarity, sequences can be aligned using the methods and computer programs that are known in the art, including BLAST, available over the world wide web at ncbi.nlm.nih.gov/BLAST. Percent complementarity between particular stretches of nucleic acid sequences within nucleic acids can be determined using any convenient method. Example methods include BLAST programs (basic local alignment search tools) and PowerBLAST programs (Altschul et al., J. Mol. Biol., 1990, 215, 403-410; Zhang and Madden, Genome Res., 1997, 7, 649-656) or by using the Gap program (Wisconsin Sequence Analysis Package, Version 8 for Unix, Genetics Computer Group, University Research Park, Madison Wis.), e.g., using default settings, which uses the algorithm of Smith and Waterman (Adv. Appl. Math., 1981, 2, 482-489).

[0105] The terms “polypeptide,” and “protein” are used interchangeably herein, and refer to a polymeric form of amino acids of any length, which can include coded and non-coded amino acids, chemically or biochemically modified or derivatized amino acids, and polypeptides having modified peptide backbones. The term includes fusion proteins, including, but not limited to, fusion proteins with a heterologous amino acid sequence.

[0106] A “vector” or “expression vector” is a replicon, such as plasmid, phage, virus, or cosmid, to which another DNA segment, i.e., an “insert”, may be attached so as to bring about the replication or expression of the attached segment in a cell.

[0107] The term “naturally-occurring” or “unmodified” or “wild type” as used herein as applied to a nucleic acid, a polypeptide, a cell, or an organism, refers to a nucleic acid, polypeptide, cell, or organism that is found in nature.

[0108] As used herein, a “mutation” refers to an insertion, deletion, substitution, duplication, or inversion of one or more amino acids or nucleotides as compared to a wild-type or reference amino acid sequence or to a wild-type or reference nucleotide sequence.

[0109] As used herein the term “isolated” is meant to describe a polynucleotide, a polypeptide, or a cell that is in an environment different from that in which the polynucleotide, the polypeptide, or the cell naturally occurs. An isolated genetically modified host cell may be present in a mixed population of genetically modified host cells.

[0110] A “host cell,” as used herein, denotes a eukaryotic cell, a prokaryotic cell, or a cell from a multicellular organism (e.g., in a cell line), which eukaryotic or prokaryotic cells are used as recipients for a nucleic acid (e.g., an expression vector), and include the progeny of the original cell which has been genetically modified by the nucleic acid. It is understood that the progeny of a single cell may not necessarily be completely identical in morphology or in genomic or total DNA complement as the original parent, due to natural, accidental, or deliberate mutation. A “recombinant host cell” (also referred to as a “genetically modified host cell”) is a host cell into which has been introduced a heterologous nucleic acid, e.g., an expression vector.

[0111] The term “tropism” ” as used herein refers to preferential entry of the virus like particle (XDP, sometimes also referred to herein as XDP) into certain cell or tissue type(s) and/or preferential interaction with the cell surface that facilitates entry into certain cell or tissue types, optionally and preferably followed by expression (e.g., transcription and, optionally, translation) of sequences carried by the XDP into the cell.

[0112] The terms “pseudotype” or “pseudotyping” as used herein, refers to viral envelope proteins that have been substituted with those of another virus possessing preferable characteristics. For example, HIV can be pseudotyped with vesicular stomatitis virus G-protein (VSV-G) envelope proteins (amongst others, described herein, below), which allows HIV to infect a wider range of cells because HIV envelope proteins target the virus mainly to CD4+presenting cells.

[0113] The term “tropism factor” as used herein refers to components integrated into the surface of an XDP that provides tropism for a certain cell or tissue type. Non-limiting examples of tropism factors include glycoproteins, antibody fragments (e.g., scFv, nanobodies, linear antibodies, etc.), receptors and ligands to target cell markers.

[0114] A “target cell marker” refers to a molecule expressed by a target cell including but not limited to cell-surface receptors, cytokine receptors, antigens, tumor-associated antigens, glycoproteins, oligonucleotides, enzymatic substrates, antigenic determinants, or binding sites that may be present in the on the surface of a target tissue or cell that may serve as ligands for an antibody fragment or glycoprotein tropism factor.

[0115] The term “conservative amino acid substitution” refers to the interchangeability in proteins of amino acid residues having similar side chains. For example, a group of amino acids having aliphatic side chains consists of glycine, alanine, valine, leucine, and isoleucine; a group of amino acids having aliphatic-hydroxyl side chains consists of serine and threonine; a group of amino acids having amide-containing side chains consists of asparagine and glutamine; a group of amino acids having aromatic side chains consists of phenylalanine, tyrosine, and tryptophan; a group of amino acids having basic side chains consists of lysine, arginine, and histidine; and a group of amino acids having sulfur-containing side chains consists of cysteine and methionine. Exemplary conservative amino acid substitution groups are: valine-leucine-isoleucine, phenylalanine-tyrosine, lysine-arginine, alanine-valine, and asparagine-glutamine.

[0116] The term “antibody,” as used herein, encompasses various antibody structures, including but not limited to monoclonal antibodies, polyclonal antibodies, multispecific antibodies (e.g., bispecific antibodies), nanobodies, single domain antibodies such as VHH antibodies, and antibody fragments so long as they exhibit the desired antigen-binding activity or immunological activity. Antibodies represent a large family of molecules that include several types of molecules, such as IgD, IgG, IgA, IgM and IgE.

[0117] An “antibody fragment” refers to a molecule other than an intact antibody that comprises a portion of an intact antibody and that binds the antigen to which the intact antibody binds. Examples of antibody fragments include but are not limited to Fv, Fab, Fab′, Fab′-SH, F(ab′)2, diabodies, single chain diabodies, linear antibodies, a single domain antibody, a single domain camelid antibody, single-chain variable fragment (scFv) antibody molecules, and multispecific antibodies formed from antibody fragments.

[0118] As used herein, “treatment” or “treating,” are used interchangeably herein and refer to an approach for obtaining beneficial or desired results, including but not limited to a therapeutic benefit and/or a prophylactic benefit. By therapeutic benefit is meant eradication or amelioration of the underlying disorder or disease being treated. A therapeutic benefit can also be achieved with the eradication or amelioration of one or more of the symptoms or an improvement in one or more clinical parameters associated with the underlying disease such that an improvement is observed in the subject, notwithstanding that the subject may still be afflicted with the underlying disorder.

[0119] The terms “therapeutically effective amount” and “therapeutically effective dose”, as used herein, refer to an amount of a drug or a biologic, alone or as a part of a composition, that is capable of having any detectable, beneficial effect on any symptom, aspect, measured parameter or characteristics of a disease state or condition when administered in one or repeated doses to a subject such as a human or an experimental animal. Such effect need not be absolute to be beneficial.

[0120] As used herein, “administering” means a method of giving a dosage of a compound (e.g., a composition of the disclosure) or a composition (e.g., a pharmaceutical composition) to a subject.

[0121] A “subject” is a mammal. Mammals include, but are not limited to, domesticated animals, non-human primates, humans, dogs, rabbits, mice, rats and other rodents.

[0122] All publications, patents, and patent applications mentioned in this specification are herein incorporated by reference to the same extent as if each individual publication, patent, or patent application was specifically and individually indicated to be incorporated by reference.

### I. General Methods

[0123] The practice of the present invention employs, unless otherwise indicated, conventional techniques of immunology, biochemistry, chemistry, molecular biology, microbiology, cell biology, genomics and recombinant DNA, which can be found in such standard textbooks as Molecular Cloning: A Laboratory Manual, 3rd Ed. (Sambrook et al., Harbor Laboratory Press 2001); Short Protocols in Molecular Biology, 4th Ed. (Ausubel et al. eds., John Wiley & Sons 1999); Protein Methods (Bollag et al., John Wiley & Sons 1996); Nonviral Vectors for Gene Therapy (Wagner et al. eds., Academic Press 1999); Viral Vectors (Kaplift & Loewy eds., Academic Press 1995); Immunology Methods Manual (I. Lefkovits ed., Academic Press 1997); and Cell and Tissue Culture: Laboratory Procedures in Biotechnology (Doyle & Griffiths, John Wiley & Sons 1998), the disclosures of which are incorporated herein by reference.

[0124] Where a range of values is provided, it is understood that endpoints are included and that each intervening value, to the tenth of the unit of the lower limit unless the context clearly dictates otherwise, between the upper and lower limit of that range and any other stated or intervening value in that stated range, is encompassed. The upper and lower limits of these smaller ranges may independently be included in the smaller ranges, and are also encompassed, subject to any specifically excluded limit in the stated range. Where the stated range includes one or both of the limits, ranges excluding either or both of those included limits are also included.

[0125] Unless defined otherwise, all technical and scientific terms used herein have the same meaning as commonly understood by one of ordinary skill in the art to which this invention belongs. All publications mentioned herein are incorporated herein by reference to disclose and describe the methods and/or materials in connection with which the publications are cited.

[0126] It must be noted that as used herein and in the appended claims, the singular forms “a,” “an,” and “the” include plural referents unless the context clearly dictates otherwise.

[0127] It will be appreciated that certain features of the disclosure, which are, for clarity, described in the context of separate embodiments, may also be provided in combination in a single embodiment. In other cases, various features of the disclosure, which are, for brevity, described in the context of a single embodiment, may also be provided separately or in any suitable sub-combination. It is intended that all combinations of the embodiments pertaining to the disclosure are specifically embraced by the present disclosure and are disclosed herein just as if each and every combination was individually and explicitly disclosed. In addition, all sub-combinations of the various embodiments and elements thereof are also specifically embraced by the present disclosure and are disclosed herein just as if each and every such sub-combination was individually and explicitly disclosed herein.

### II. Systems for Genetic Editing and Gene-Editing Pairs

[0128] In a first aspect, the present disclosure provides systems comprising a Class 2, Type V CRISPR nuclease protein and one or more guide nucleic acids (e.g. gRNA) for use in modifying or editing a target nucleic acid of a gene, inclusive of coding and non-coding regions. Generally, any portion of a gene can be targeted using the programable systems and methods provided herein. As used herein, a “system,” such as the systems comprising a CRISPR nuclease protein and one or more gRNAs of the disclosure as gene editing pairs, as well as nucleic acids encoding the CRISPR nuclease proteins and gRNA and vectors comprising the nucleic acids or CRISPR nuclease protein and one or more gRNAs the disclosure, is used interchangeably with term “composition.”

[0129] In some embodiments, the disclosure provides systems specifically designed to modify the target nucleic acid of a gene in eukaryotic cells; either in vitro, ex vivo, or in vivo in a subject. Generally, any portion of the gene can be targeted using the programmable systems and methods provided herein. In some embodiments, the CRISPR nuclease is a Class 2, Type V nuclease. Although members of Class 2 Type V CRISPR-Cas nucleases have differences, they share some common characteristics that distinguish them from the Cas9 systems. Firstly, the Type V nucleases possess an RNA-guided single effector containing a RuvC domain but no HNH domain, and they recognize a TC motif PAM 5′ upstream to the target region on the non-targeted strand, which is different from Cas9 systems which rely on G-rich PAM at 3′ side of target sequences. Type V nucleases generate staggered double-stranded breaks distal to the PAM sequence, unlike Cas9, which generates a blunt end in the proximal site close to the PAM. In addition, Type V nucleases degrade ssDNA in trans when activated by target dsDNA or ssDNA binding in cis. In some embodiments, the disclosure provides Class 2, Type V nuclease selected from the group consisting of Cas12a, Cas12b, Cas12c, Cas12d (CasY), Cas12j, Cas12k, C2c4, C2c8, C2c5, C2c10, C2c9, CasZ, and CasX. In some embodiments, the disclosure provides systems comprising one or more CasX variant proteins and one or more guide nucleic acid (gRNA) variants as a CasX:gRNA system.

[0130] Provided herein are systems comprising a Class 2, Type V protein and a gRNA variant, referred to herein as a gene editing pair. In some embodiments, the Class 2, Type V variant is a CasX variant, such as, but not limited to the sequence of SEQ ID NO: 416. The terms CasX variant protein and CasX variant are used interchangeably herein. In some embodiments, the gRNA is a variant of another gRNA, such as, but not limited to the sequences of SEQ ID NOS: 2238 and 2239. A gRNA and CasX protein can bind together via non-covalent interactions to form a gene editing pair complex, referred to herein as a ribonucleoprotein (RNP) complex. In some embodiments, the use of a pre-complexed CasX:gRNA RNP confers advantages in the delivery of the system components to a cell or target nucleic acid for editing of the target nucleic acid. In the RNP, the gRNA can provide target specificity to the RNP complex by including a targeting sequence (or “spacer”) having a nucleotide sequence that is complementary to a sequence of a target nucleic acid. In the RNP, the CasX protein of the pre-complexed CasX:gRNA provides the site-specific activity and is guided to a target site (and further stabilized at a target site) within a target nucleic acid sequence to be modified by virtue of its association with the gRNA. The CasX variant protein of the RNP complex provides the site-specific activities of the complex such as binding, cleavage, or nicking of the target sequence by the CasX protein. Provided herein are systems and cells comprising the CasX variant proteins, gRNA variants, and CasX:gRNA gene editing pairs of any combination of the CasX variant and gRNA variant embodiments described herein, as well as delivery modalities comprising the CasX:gRNA. Each of these components and their use in the editing of the target nucleic acid of a gene is described herein, below.

[0131] In some embodiments, the disclosure provides systems of gene editing pairs comprising a CasX variant protein selected from any one of CasX variant proteins of Table 3 (SEQ ID NOS: 247-592 and 1147-1231, or a sequence having at least about 85%, at least about 90%, or at least about 95%, or at least about 95%, or at least about 96%, or at least about 97%, or at least about 98%, or at least about 99% sequence identity thereto, while the gRNA is a gRNA variant as described herein (e.g., SEQ ID NOS: 2101-2332 and 2353-2398 set forth in Table 2), or sequence variants having at least 60%, or at least 70%, at least about 80%, or at least about 90%, or at least about 95% sequence identity thereto, wherein the gRNA comprises a targeting sequence complementary to the target nucleic acid. In some embodiments, the disclosure provides systems of gene editing pairs comprising a CasX variant protein selected from any one of CasX variant proteins of Table 3 (SEQ ID NOS: 270-592 and 1147-1231), while the gRNA is a gRNA variant as described herein (e.g., SEQ ID NOS: 2238-2332 and 2353-2398), wherein the gRNA comprises a targeting sequence complementary to the target nucleic acid. In some embodiments, the disclosure provides systems of gene editing pairs comprising a CasX variant protein selected from any one of CasX variant proteins of Table 3 (SEQ ID NOS: 415-592 and 1147-1231), while the gRNA is a gRNA variant as described herein (e.g., SEQ ID NOS: 2281-2332 and 2353-2398), wherein the gRNA comprises a targeting sequence complementary to the target nucleic acid. In other embodiments, the disclosure provides systems of a gene editing pair comprising the CasX variant protein, a first gRNA variant as described herein; e.g., SEQ ID NOS: 2101-2332 or 2353-2398 set forth in Table 2) with a targeting sequence, and a second gRNA variant, wherein the second gRNA variant has a targeting sequence complementary to a different or overlapping portion of the target nucleic acid compared to the targeting sequence of the first gRNA. In other embodiments, the disclosure provides systems of a gene editing pair comprising the CasX variant protein, a first gRNA variant as described herein; e.g., SEQ ID NOS: 2101-2332 or 2353-2398) with a targeting sequence, and a second gRNA variant, wherein the second gRNA variant has a targeting sequence complementary to a different or overlapping portion of the target nucleic acid compared to the targeting sequence of the first gRNA. In other embodiments, the disclosure provides systems of a gene editing pair comprising the CasX variant protein, a first gRNA variant as described herein; e.g., SEQ ID NOS: 2281-2332 or 2353-2398) with a targeting sequence, and a second gRNA variant, wherein the second gRNA variant has a targeting sequence complementary to a different or overlapping portion of the target nucleic acid compared to the targeting sequence of the first gRNA. In some embodiments of the CasX:gRNA gene editing pairs of the disclosure, the CasX variant protein is selected from the group consisting of CasX variant proteins 515, 528, 529, 534-539, 668, 672, and 678 of Table 3 (SEQ ID NOS: 416, 428, 434-439, 567, 570 and 576) and the sgRNA variant is selected from the group consisting of gRNA variants 229-237 of Table 2 (SEQ ID NOS: 2286-2294). In a particular embodiment, the gene editing pair comprises a CasX variant protein selected from any one of CasX variant proteins 668 (SEQ ID NO: 567), 672 (SEQ ID NO: 570) or 676 (SEQ ID NO: 574) and gRNA variant 235 (SEQ ID NO: 2292).

[0132] In some embodiments, the gene editing pair is capable of associating together to form a ribonuclear protein complex (RNP). In other embodiments, the gene editing pair is associated together in a ribonuclear protein complex (RNP). In some embodiments, the RNP of the gene editing pair is capable of binding and cleaving the double strand of a target nucleic acid, including a coding sequence, a complement of a coding sequence, a non-coding sequence, and to regulatory elements. In some embodiments, the RNP of the gene editing pair is capable of binding a target nucleic acid and generating one or more single-stranded nicks in the target nucleic acid. In some embodiments, the RNP of the gene editing pair is capable of binding a target nucleic acid but is not capable of cleaving the target nucleic acid.

[0133] In some embodiments, the variant gene editing pair has one or more improved characteristics compared to a reference gene editing pair comprising a reference CasX protein of SEQ ID NO: 1, SEQ ID NO: 2, or SEQ ID NO: 3 and a reference gRNA of SEQ ID NO: 5 or SEQ ID NO: 4. In other embodiments, the variant gene editing pair of a CasX variant and a gRNA variant has one or more improved characteristics compared to a gene editing pair comprising a CasX variant from which the variant was derived (e.g., CasX 515, SEQ ID NO: 416) and the gRNA variant from which the variant was derived (e.g., gRNA scaffold 174 (SEQ ID NO: 2238) or 175 (SEQ ID NO: 2239). In the foregoing embodiments, the one or more improved characteristics can be assayed in an in vitro assay under comparable conditions for the gene editing pair and the reference CasX and reference gRNA. Exemplary improved characteristics, as described herein, may, in some embodiments, include CasX:gRNA RNP complex stability, increased binding affinity between the CasX and gRNA, improved kinetics of RNP complex formation, higher percentage of cleavage-competent RNP, increased RNP binding affinity to the target nucleic acid, unwinding of the target nucleic acid, increased editing activity, increased editing efficiency, increased editing specificity for the target nucleic acid, decreased off-target editing or cleavage, increased activity of the nuclease, increased target strand loading for double strand cleavage, decreased target strand loading for single strand nicking, increased binding of the non-target strand of DNA, or increased resistance to nuclease activity. In the foregoing embodiments, the improvement is at least about 2-fold, at least about 5-fold, at least about 10-fold, at least about 50-fold, at least about 100-fold, at least about 500-fold, at least about 1000-fold, at least about 5000-fold, at least about 10,000-fold, or at least about 100,000-fold compared to the characteristic of a reference CasX protein and reference gRNA pair, or to the characterisitics of the CasX variant and gRNA variant from which the gene editing pair was derived. In other cases, the one or more of the improved characteristics may be improved about 1.1 to 100,00-fold, about 1.1 to 10,00-fold, about 1.1 to 1,000-fold, about 1.1 to 500-fold, about 1.1 to 100-fold, about 1.1 to 50-fold, about 1.1 to 20-fold, about 10 to 100,00-fold, about 10 to 10,00-fold, about 10 to 1,000-fold, about 10 to 500-fold, about 10 to 100-fold, about 10 to 50-fold, about 10 to 20-fold, about 2 to 70-fold, about 2 to 50-fold, about 2 to 30-fold, about 2 to 20-fold, about 2 to 10-fold, about 5 to 50-fold, about 5 to 30-fold, about 5 to 10-fold, about 100 to 100,00-fold, about 100 to 10,00-fold, about 100 to 1,000-fold, about 100 to 500-fold, about 500 to 100,00-fold, about 500 to 10,00-fold, about 500 to 1,000-fold, about 500 to 750-fold, about 1,000 to 100,00-fold, about 10,000 to 100,00-fold, about 20 to 500-fold, about 20 to 250-fold, about 20 to 200-fold, about 20 to 100-fold, about 20 to 50-fold, about 50 to 10,000-fold, about 50 to 1,000-fold, about 50 to 500-fold, about 50 to 200-fold, or about 50 to 100-fold, improved relative to a reference gene editing pair, or to the characterisitics of the CasX variant and gRNA variant from which the gene editing pair was derived. In other cases, the one or more of the improved characteristics may be improved about 1.1-fold, 1.2-fold, 1.3-fold, 1.4-fold, 1.5-fold, 1.6-fold, 1.7-fold, 1.8-fold, 1.9-fold, 2-fold, 3-fold, 4-fold, 5-fold, 6-fold, 7-fold, 8-fold, 9-fold, 10-fold, 11-fold, 12-fold, 13-fold, 14-fold, 15-fold, 16-fold, 17-fold, 18-fold, 19-fold, 20-fold, 25-fold, 30-fold, 40-fold, 45-fold, 50-fold, 55-fold, 60-fold, 70-fold, 80-fold, 90-fold, 100-fold, 110-fold, 120-fold, 130-fold, 140-fold, 150-fold, 160-fold, 170-fold, 180-fold, 190-fold, 200-fold, 210-fold, 220-fold, 230-fold, 240-fold, 250-fold, 260-fold, 270-fold, 280-fold, 290-fold, 300-fold, 310-fold, 320-fold, 330-fold, 340-fold, 350-fold, 360-fold, 370-fold, 380-fold, 390-fold, 400-fold, 425-fold, 450-fold, 475-fold, or 500-fold or more improved relative to a reference gene editing pair, or to the characterisitics of the CasX variant and gRNA variant from which the gene editing pair was derived.

[0134] In some embodiments, wherein the gene editing pair comprises both a CasX variant protein and a gRNA variant as described herein, the one or more characteristics of the gene editing pair is improved beyond what can be achieved by varying the CasX protein or the gRNA alone. In some embodiments, the CasX variant protein and the gRNA variant act additively to improve one or more characteristics of the gene editing pair. In some embodiments, the CasX variant protein and the gRNA variant act synergistically to improve one or more characteristics of the gene editing pair. In the foregoing embodiments, the improvement is at least about 2-fold, at least about 5-fold, at least about 10-fold, at least about 50-fold, at least about 100-fold, at least about 500-fold, at least about 1000-fold, at least about 5000-fold, at least about 10,000-fold, or at least about 100,000-fold compared to the characteristic of a reference CasX protein and reference gRNA pair, or to the characterisitics of the CasX variant and gRNA variant from which the gene editing pair was derived.

[0135] In some embodiments, the disclosure provides compositions of gene editing pairs of any of the embodiments disclosed herein for use as a medicament for the treatment of a subject having a disease.

[0136] In other embodiments, the systems of the disclosure comprise one or more CasX variant proteins, one or more guide nucleic acids (gRNA) and one or more donor template nucleic acids comprising a nucleic acid encoding a portion of a gene wherein the donor template nucleic acid comprises a wild-type sequence for correction of a mutation, or comprises a deletion, an insertion, or a mutation of one or more nucleotides in comparison to a wild-type genomic nucleic acid sequence for knocking-down or knocking-out the gene.

[0137] In other embodiments, the disclosure provides vectors encoding or comprising the CasX variant, gRNA variant, and, optionally, donor templates for the production and/or delivery of the CasX:gRNA systems. Also provided herein are methods of making CasX variant proteins and gRNA variants, as well as methods of using the CasX variants and gRNA variants, including methods of gene editing and methods of treatment. The CasX variant proteins and gRNA variant components of the CasX:gRNA systems and their features, as well as the delivery modalities and the methods of using the systems are described more fully, below.

[0138] The donor templates of the CasX:gRNA systems are designed depending on whether they are utilized to correct mutations in a target gene or insert a transgene at a different locus in the genome (a “knock-in”), or are utilized to disrupt the expression of a gene product that is aberrant; e.g., it comprises one or more mutations that reduce expression of the gene product or rendering the protein dysfunctional (a “knock-down” or “knock-out”). In some embodiments, the donor template is a single stranded DNA template or a single stranded RNA template. In other embodiments, the donor template is a double stranded DNA template. In some embodiments, the CasX:gRNA systems utilized in the editing of the target nucleic acid comprises a donor template having all or at least a portion of an open reading frame of a gene in the target nucleic acid for insertion of a corrective, wild-type sequence to correct a defective protein. In other cases, the donor template comprises all or a portion of a wild-type gene for insertion at a different locus in the genome for expression of the gene product. In still other cases, a portion of the gene can be inserted upstream ('5) of the mutation in the target nucleic acid, wherein the donor template gene portion spans to the C-terminus of the gene or to the 3′ end of the sequence having the mutation, resulting, upon its insertion into the target nucleic acid, in expression of a functional gene product.

[0139] In some embodiments, the donor template sequence comprises a non-homologous sequence flanked by two regions of homology 5′ and 3′ to the break sites of the target nucleic acid (i.e., homologous arms), facilitating insertion of the non-homologous sequence at the target region which can be mediated by homology directed repair (HDR) or homology-independent targeted integration (HITI). The exogenous donor template inserted by HITI can be any length, for example, a relatively short sequence of between 10 and 50 nucleotides in length, or a longer sequence of about 50-1000 nucleotides in length. The lack of homology can be, for example, having no more than 20-50% sequence identity and/or lacking in specific hybridization at low stringency. In other cases, the lack of homology can further include a criterion of having no more than 5, 6, 7, 8, or 9 bp identity. In such cases, the use of homologous arms facilitates the insertion of the non-homologous sequence at the break site(s) introduced by the nuclease. In some embodiments, the donor template polynucleotide comprises at least about 10, at least about 50, at least about 100, or at least about 200, or at least about 300, or at least about 400, or at least about 500, or at least about 600, or at least about 700, or at least about 800, or at least about 900, or at least about 1000, or at least about 10,000, or at least about 15,000 nucleotides. In other embodiments, the donor template comprises at least about 10 to about 15,000 nucleotides, or at least about 100 to about 10,000 nucleotides, or at least about 400 to about 8,000 nucleotides, or at least about 600 to about 5000 nucleotides, or at least about 1000 to about 2000 nucleotides. The donor template sequence may comprise certain sequence differences as compared to the genomic sequence; e.g., restriction sites, nucleotide polymorphisms, selectable markers (e.g., drug resistance genes, fluorescent proteins, enzymes etc.), etc., which may be used to assess for successful insertion of the donor nucleic acid at the cleavage site or in some cases may be used for other purposes (e.g., to signify expression at the targeted genomic locus). Alternatively, these sequence differences may include flanking recombination sequences such as FLPs, loxP sequences, or the like, that can be activated at a later time for removal of the marker sequence.

### III. Guide Nucleic Acids of the Systems for Genetic Editing

[0140] In another aspect, the disclosure relates to specifically-designed guide ribonucleic acids (gRNA) comprising a targeting sequence (also referred to herein as a spacer) complementary to (and are therefore able to hybridize with) a target nucleic acid sequence of a gene that have utility, when complexed with a CRISPR nuclease, in genome editing of the target nucleic acid in a cell. It is envisioned that in some embodiments, multiple gRNAs are delivered in the systems for the modification of a target nucleic acid. For example, a pair of gRNAs with targeting sequences to different or overlapping regions of the target nucleic acid sequence can be used, when each is complexed with a CRISPR nuclease, in order to bind and cleave at two different or overlapping sites within the gene, which is then edited by non-homologous end joining (NHEJ), homology-directed repair (HDR), homology-independent targeted integration (HITI), micro-homology mediated end joining (MMEJ), single strand annealing (SSA) or base excision repair (BER).

[0141] In some embodiments, the disclosure provides gRNAs utilized in the systems that have utility in genome editing a gene in a eukaryotic cell. In a particular embodiment, the gRNA of the systems are capable of forming a complex with a CRISPR nuclease; a ribonucleoprotein (RNP) complex, described more fully, below.

a. Reference gRNA and gRNA Variants

[0142] As used herein, a “reference gRNA” refers to a CRISPR guide nucleic acid comprising a wild-type sequence of a naturally-occurring gRNA. In some embodiments, a reference gRNA of the disclosure may be subjected to one or more mutagenesis methods, such as the mutagenesis methods described herein in the Examples (e.g., Example 13, as well as in PCT/US20/36506 and WO2020247883A2, incorporated by reference herein), which may include Deep Mutational Evolution (DME), deep mutational scanning (DMS), error prone PCR, cassette mutagenesis, random mutagenesis, staggered extension PCR, gene shuffling, or domain swapping, in order to generate one or more guide nucleic acid variants (referred to herein as “gRNA variant”) with enhanced or varied properties relative to the reference gRNA. gRNA variants also include variants comprising one or more exogenous sequences, for example fused to either the 5′ or 3′ end, or inserted internally. The activity of reference gRNAs or the variant from which it was derived may be used as a benchmark against which the activity of gRNA variants are compared, thereby measuring improvements in function or other characteristics of the gRNA variants. In other embodiments, a reference gRNA or a gRNA variant may be subjected to one or more deliberate, specifically-targeted mutations in order to produce a gRNA variant; for example a rationally designed variant.

[0143] The gRNAs of the disclosure comprise two segments: a targeting sequence and a protein-binding segment. The targeting segment of a gRNA includes a nucleotide sequence (referred to interchangeably as a guide sequence, a spacer, a targeter, or a targeting sequence) that is complementary to (and therefore hybridizes with) a specific sequence (a target site) within the target nucleic acid sequence (e.g., a target ssRNA, a target ssDNA, a strand of a double stranded target DNA, etc.), described more fully below. The targeting sequence of a gRNA is capable of binding to a target nucleic acid sequence, including a coding sequence, a complement of a coding sequence, a non-coding sequence, and to regulatory elements. The protein-binding segment (or “activator” or “protein-binding sequence”) interacts with (e.g., binds to) a CasX protein as a complex, forming an RNP (described more fully, below). The protein-binding segment is alternatively referred to herein as a “scaffold”, which is comprised of several regions, described more fully, below.

[0144] In the case of a dual guide RNA (dgRNA), the targeter and the activator portions each have a duplex-forming segment, where the duplex forming segment of the targeter and the duplex-forming segment of the activator have complementarity with one another and hybridize to one another to form a double stranded duplex (dsRNA duplex for a gRNA). When the gRNA is a gRNA, the term “targeter” or “targeter RNA” is used herein to refer to a crRNA-like molecule (crRNA: “CRISPR RNA”) of a CasX dual guide RNA (and therefore of a CasX single guide RNA when the “activator” and the “targeter” are linked together, e.g., by intervening nucleotides). The crRNA has a 5′ region that anneals with the tracrRNA followed by the nucleotides of the targeting sequence. Thus, for example, a guide RNA (dgRNA or sgRNA) comprises a guide sequence and a duplex-forming segment of a crRNA, which can also be referred to as a crRNA repeat. A corresponding tracrRNA-like molecule (activator) also comprises a duplex-forming stretch of nucleotides that forms the other half of the dsRNA duplex of the protein-binding segment of the guide RNA. Thus, a targeter and an activator, as a corresponding pair, hybridize to form a dual guide RNA, referred to herein as a “dual-molecule gRNA”, a “dgRNA”, a “double-molecule guide RNA”, or a “two-molecule guide RNA”. Site-specific binding and/or cleavage of a target nucleic acid sequence (e.g., genomic DNA) by the CasX protein can occur at one or more locations (e.g., a sequence of a target nucleic acid) determined by base-pairing complementarity between the targeting sequence of the gRNA and the target nucleic acid sequence. Thus, for example, the gRNA of the disclosure have sequences complementarity to and therefore can hybridize with the target nucleic acid that is adjacent to a sequence complementary to a TC PAM motif or a PAM sequence, such as ATC, CTC, GTC, or TTC. Because the targeting sequence of a guide sequence hybridizes with a sequence of a target nucleic acid sequence, a targeter can be modified by a user to hybridize with a specific target nucleic acid sequence, so long as the location of the PAM sequence is considered. Thus, in some cases, the sequence of a targeter may be the complement to a non-naturally occurring sequence. In other cases, the sequence of a targeter may be a naturally-occurring sequence, derived from the complement to the gene sequence to be edited. In other embodiments, the activator and targeter of the gRNA are covalently linked to one another (rather than hybridizing to one another) and comprise a single molecule, referred to herein as a “single-molecule gRNA,” “single guide RNA”, a “single-molecule guide RNA,” a “one-molecule guide RNA”, or a “sgRNA”. In some embodiments, the sgRNA includes an “activator” or a “targeter” and thus can be an “activator-RNA” and a “targeter-RNA,” respectively. In some embodiments, the gRNA is a ribonucleic acid molecule (“gRNA”), and in other embodiments, the gRNA is a chimera, and comprises both DNA and RNA. As used herein, the term gRNA cover naturally-occurring molecules, as well as sequence variants (e.g. non-naturally occurring modified nucleotides).

[0145] Collectively, the assembled gRNAs of the disclosure comprise four distinct regions, or domains: the RNA triplex, the scaffold stem, the extended stem, and the targeting sequence that, in the embodiments of the disclosure, is specific for a target nucleic acid and is located on the 3′end of the gRNA. The RNA triplex, the scaffold stem, and the extended stem, together, are referred to as the “scaffold” of the gRNA (gRNA scaffold). The gRNA scaffolds of the disclosure can comprise RNA, or RNA and DNA. The gRNA scaffolds can contains uracils (U), and one or more uracils can be replaced by thymines (T).

b. RNA Triplex

[0146] In some embodiments of the guide RNAs provided herein, the gRNA comprises an RNA triplex, which, on some cases, comprises the sequence of a UUU--N_{X}(˜4-15)--UUU stem loop (SEQ ID NO: 241) that ends with an AAAG after 2 intervening stem loops (the scaffold stem loop and the extended stem loop), forming a pseudoknot that may also extend past the triplex into a duplex pseudoknot. The UU-UUU-AAA sequence of the triplex forms as a nexus between the targeting sequence, scaffold stem, and extended stem. In exemplary gRNAs, the UUU-loop-UUU region is coded for first, then the scaffold stem loop, and then the extended stem loop, which is linked by the tetraloop, and then an AAAG closes off the triplex before becoming the targeting sequence.

c. Scaffold Stem Loop

[0147] In some embodiments of gRNAs of the disclosure, the triplex region is followed by the scaffold stem loop. The scaffold stem loop is a region of the gRNA that is bound by CasX protein (such as a reference or CasX variant protein) when an RNP is formed. In some embodiments, the scaffold stem loop is a fairly short and stable stem loop, and increases the overall stability of the gRNA. In some cases, the scaffold stem loop does not tolerate many changes, and requires some form of an RNA bubble. In some embodiments, the scaffold stem is necessary for gRNA function. While it is perhaps analogous to the nexus stem of Cas9 guide as being a critical stem loop, the scaffold stem of a gRNA, in some embodiments, has a necessary bulge (RNA bubble) that is different from many other stem loops found in CRISPR/Cas systems. In some embodiments, the presence of this bulge is conserved across gRNA that interact with different CasX proteins. An exemplary sequence of a scaffold stem loop sequence of a gRNA comprises the sequence CCAGCGACUAUGUCGUAUGG (SEQ ID NO: 242).

d. Extended Stem Loop

[0148] In some embodiments of the gRNAs of the disclosure, the scaffold stem loop is followed by the extended stem loop. In some embodiments, the extended stem comprises a synthetic tracr and crRNA fusion that is largely unbound by the CasX protein. In some embodiments, the extended stem loop can be highly malleable. In some embodiments, a single guide gRNA is made with a GAAA tetraloop linker or a GAGAAA linker between the tracr and crRNA in the extended stem loop. In some cases, the targeter and activator of a sgRNA are linked to one another by intervening nucleotides and the linker can have a length of from 3 to 20 nucleotides. In some embodiments of the sgRNAs of the disclosure, the extended stem is a large 32-bp loop that sits outside of the CasX protein in the ribonucleoprotein complex. An exemplary sequence of an extended stem loop sequence of a reference gRNA comprises the sequence GCGCUUAUUUAUCGGAGAGAAAUCCGAUAAAUAAGAAGC (SEQ ID NO: 15).

e. Targeting Sequence

[0149] In some embodiments of the gRNAs of the disclosure, the extended stem loop is followed by a region that forms part of the triplex, and then the targeting sequence (or “spacer”) at the 3′ end of the gRNA. The targeting sequence targets the CasX ribonucleoprotein holo complex to a specific region of the target nucleic acid sequence of the gene to be modified. Thus, for example, gRNA targeting sequences of the disclosure have sequences complementarity to, and therefore can hybridize to, a portion of a gene in a target nucleic acid in a eukaryotic cell (e.g., a eukaryotic chromosome, chromosomal sequence, etc.) as a component of the RNP when the TC PAM motif or any one of the PAM sequences TTC, ATC, GTC, or CTC is located 1 nucleotide 5′ to the non-target strand sequence complementary to the target sequence. The targeting sequence of a gRNA can be modified so that the gRNA can target a desired sequence of any desired target nucleic acid sequence, so long as the PAM sequence location is taken into consideration. In some embodiments, the gRNA scaffold is 5′ of the targeting sequence, with the targeting sequence on the 3′ end of the gRNA. In some embodiments, the PAM motif sequence recognized by the nuclease of the RNP is TC. In other embodiments, the PAM sequence recognized by the nuclease of the RNP is NTC; i.e., ATC, CTC, GTC, or TTC.

[0150] In some embodiments, the disclosure provides a gRNA wherein the targeting sequence of the gRNA is complementary to a target nucleic acid sequence of a gene to be modified. In some embodiments, the targeting sequence of the gRNA is complementary to a target nucleic acid sequence of a gene comprising one or more mutations compared to a wild-type gene sequence for purposes of editing the sequence comprising the mutations with the CasX:gRNA systems of the disclosure. In such cases, the modification effected by the CasX:gRNA system can either correct or compensate for the mutation or can knock down or knock out expression of the mutant gene product. In other embodiments, the targeting sequence of the gRNA is complementary to a target nucleic acid sequence of a wild-type gene for purposes of editing the sequence to introduce a mutation with the CasX:gRNA systems of the disclosure in order to knock-down or knock-out the gene. In some embodiments, the targeting sequence of a gRNA is designed to be specific for an exon of the gene of the target nucleic acid. In other embodiments, the targeting sequence of a gRNA is designed to be specific for an intron of the gene of the target nucleic acid. In other embodiments, the targeting sequence of the gRNA is designed to be specific for an intron-exon junction of the gene of the target nucleic acid. In other embodiments, the targeting sequence of the gRNA is designed to be specific for a regulatory element of the gene of the target nucleic acid. In some embodiments, the targeting sequence of the gRNA is designed to be complementary to a sequence comprising one or more single nucleotide polymorphisms (SNPs) in a gene of the target nucleic acid. SNPs that are within the coding sequence or within non-coding sequences are both within the scope of the instant disclosure. In other embodiments, the targeting sequence of the gRNA is designed to be complementary to a sequence of an intergenic region of the gene of the target nucleic acid.

[0151] In some embodiments, the targeting sequence is specific for a regulatory element that regulates expression of the gene product. Such regulatory elements include, but are not limited to promoter regions, enhancer regions, intergenic regions, 5′ untranslated regions (5′ UTR), 3′ untranslated regions (3′ UTR), conserved elements, and regions comprising cis-regulatory elements. The promoter region is intended to encompass nucleotides within 5 kb of the initiation point of the encoding sequence or, in the case of gene enhancer elements or conserved elements, can be thousands of bp, hundreds of thousands of bp, or even millions of bp away from the encoding sequence of the gene of the target nucleic acid. In the foregoing, the targets are those in which the encoding gene of the target is intended to be knocked out or knocked down such that the gene product is not expressed or is expressed at a lower level in a cell.

[0152] In some embodiments, the targeting sequence of a gRNA has between 14 and 35 consecutive nucleotides. In some embodiments, the targeting sequence of a gRNA has between 10 and 30 consecutive nucleotides. In some embodiments, the targeting sequence has 10, 11, 12, 13, 14, 15, 16, 17, 18, 19, 20, 21, 22, 23, 24, 25, 26, 27, 28, 29, or 30 consecutive nucleotides. In some embodiments, the targeting sequence of the gRNA consists of 20 consecutive nucleotides. In some embodiments, the targeting sequence consists of 19 consecutive nucleotides. In some embodiments, the targeting sequence consists of 18 consecutive nucleotides. In some embodiments, the targeting sequence consists of 17 consecutive nucleotides. In some embodiments, the targeting sequence consists of 16 consecutive nucleotides. In some embodiments, the targeting sequence consists of 15 consecutive nucleotides. In some embodiments, the targeting sequence has 10, 11, 12, 13, 14, 15, 16, 17, 18, 19, 20, 21, 22, 23, 24, 25, 26, 27, 28, 29, or 30 consecutive nucleotides and the targeting sequence can comprise 0 to 5, 0 to 4, 0 to 3, or 0 to 2 mismatches relative to the target nucleic acid sequence and retain sufficient binding specificity such that the RNP comprising the gRNA comprising the targeting sequence can form a complementary bond with respect to the target nucleic acid.

[0153] In some embodiments, the CasX:gRNA system comprises a first gRNA and further comprises a second (and optionally a third, fourth, fifth, or more) gRNA, wherein the second gRNA or additional gRNA has a targeting sequence complementary to a different or overlapping portion of the target nucleic acid sequence compared to the targeting sequence of the first gRNA such that multiple points in the target nucleic acid are targeted, and for example, multiple breaks are introduced in the target nucleic acid by the CasX. It will be understood that in such cases, the second or additional gRNA is complexed with an additional copy of the CasX protein. By selection of the targeting sequences of the gRNA, defined regions of the target nucleic acid sequence bracketing a mutation can be modified or edited using the CasX:gRNA systems described herein, including facilitating the insertion of a donor template or the excision of the DNA between the cleavage sites in cases, for example, where mutant repeats occur or where removal of an exon comprising mutations neverthess results in expression of a functional gene product.

f. gRNA Scaffolds

[0154] With the exception of the targeting sequence region, the remaining regions of the gRNA are referred to herein as the scaffold. In some embodiments, the gRNA scaffolds are derived from naturally-occurring sequences, described below as reference gRNA. In other embodiments, the gRNA scaffolds are variants of other gRNA variants wherein mutations, insertions, deletions or domain substitutions are introduced to confer desirable properties on the gRNA.

[0155] In some embodiments, a reference gRNA comprises a sequence isolated or derived from Deltaproteobacteria. In some embodiments, the sequence is a CasX tracrRNA sequence. Exemplary reference tracrRNA sequences isolated or derived from Deltaproteobacteria may include: ACAUCUGGCGCGUUUAUUCCAUUACUUUGGAGCCAGUCCCAGCGACUAUGUCGU AUGGACGAAGCGCUUAUUUAUCGGAGA (SEQ ID NO: 6) and ACAUCUGGCGCGUUUAUUCCAUUACUUUGGAGCCAGUCCCAGCGACUAUGUCGU AUGGACGAAGCGCUUAUUUAUCGG (SEQ ID NO: 7). Exemplary crRNA sequences isolated or derived from Deltaproteobacteria may comprise a sequence of CCGAUAAGUAAAACGCAUCAAAG (SEQ ID NO: 243).

[0156] In some embodiments, a reference guide RNA comprises a sequence isolated or derived from Planctomycetes. In some embodiments, the sequence is a tracrRNA sequence. Exemplary reference tracrRNA sequences isolated or derived from Planctomycetes may include: UACUGGCGCUUUUAUCUCAUUACUUUGAGAGCCAUCACCAGCGACUAUGUCGUA UGGGUAAAGCGCUUAUUUAUCGGAGA (SEQ ID NO: 8) and UACUGGCGCUUUUAUCUCAUUACUUUGAGAGCCAUCACCAGCGACUAUGUCGUA UGGGUAAAGCGCUUAUUUAUCGG (SEQ ID NO: 9). Exemplary crRNA sequences isolated or derived from Planctomycetes may comprise a sequence of UCUCCGAUAAAUAAGAAGCAUCAAAG (SEQ ID NO: 244).

[0157] In some embodiments, a reference gRNA comprises a sequence isolated or derived from Candidatus Sungbacteria. Exemplary CasX reference tracrRNA sequences isolated or derived from Candidatus Sungbacteria may comprise sequences of:

(SEQ ID NO: 10)
GUUUACACACUCCCUCUCAUAGGGU,
(SEQ ID NO: 11)
GUUUACACACUCCCUCUCAUGAGGU,
(SEQ ID NO: 12)
UUUUACAUACCCCCUCUCAUGGGAU
and
(SEQ ID NO: 13)
GUUUACACACUCCCUCUCAUGGGGG.

[0158] Table 1 provides the sequences of reference gRNA tracr, cr and scaffold sequences. In some embodiments, the disclosure provides gRNA variant sequences wherein the gRNA has a scaffold comprising a sequence having at least one nucleotide modification relative to a reference gRNA sequence having a sequence of any one of SEQ ID NOS: 4-16 of Table 1. It will be understood that in those embodiments wherein a vector comprises a DNA encoding sequence for a gRNA, or where a gRNA is a chimera of RNA and DNA, that thymine (T) bases can be substituted for the uracil (U) bases of any of the gRNA sequence embodiments described herein.

TABLE 1
Reference gRNA tracr, cr and scaffold sequences

| SEQ | |
|---|---|
| ID NO. | Nucleotide Sequence |
| 4 | ACAUCUGGCGCGUUUAUUCCAUUACUUUGGAGCCAGUCCCAGC |
| | GACUAUGUCGUAUGGACGAAGCGCUUAUUUAUCGGAGAGAAAC |
| | CGAUAAGUAAAACGCAUCAAAG |
| 5 | UACUGGCGCUUUUAUCUCAUUACUUUGAGAGCCAUCACCAGCG |
| | ACUAUGUCGUAUGGGUAAAGCGCUUAUUUAUCGGAGAGAAAUC |
| | CGAUAAAUAAGAAGCAUCAAAG |
| 6 | ACAUCUGGCGCGUUUAUUCCAUUACUUUGGAGCCAGUCCCAGC |
| | GACUAUGUCGUAUGGACGAAGCGCUUAUUUAUCGGAGA |
| 7 | ACAUCUGGCGCGUUUAUUCCAUUACUUUGGAGCCAGUCCCAGC |
| | GACUAUGUCGUAUGGACGAAGCGCUUAUUUAUCGG |
| 8 | UACUGGCGCUUUUAUCUCAUUACUUUGAGAGCCAUCACCAGCG |
| | ACUAUGUCGUAUGGGUAAAGCGCUUAUUUAUCGGAGA |
| 9 | UACUGGCGCUUUUAUCUCAUUACUUUGAGAGCCAUCACCAGCG |
| | ACUAUGUCGUAUGGGUAAAGCGCUUAUUUAUCGG |
| 10 | GUUUACACACUCCCUCUCAUAGGGU |
| 11 | GUUUACACACUCCCUCUCAUGAGGU |
| 12 | UUUUACAUACCCCCUCUCAUGGGAU |
| 13 | GUUUACACACUCCCUCUCAUGGGGG |
| 14 | CCAGCGACUAUGUCGUAUGG |
| 15 | GCGCUUAUUUAUCGGAGAGAAAUCCGAUAAAUAAGAAGC |
| 16 | GGCGCUUUUAUCUCAUUACUUUGAGAGCCAUCACCAGCGACUA |
| | UGUCGUAUGGGUAAAGCGCUUAUUUAUCGGA |

g. gRNA Variants

[0159] In another aspect, the disclosure relates to gRNA variants, which comprise one or more modifications relative to a reference gRNA scaffold or are derived from another gRNA variant. As used herein, “scaffold” refers to all parts to the gRNA necessary for gRNA function with the exception of the targeting sequence.

[0160] In some embodiments, a gRNA variant comprises one or more nucleotide substitutions, insertions, deletions, or swapped or replaced regions relative to a reference gRNA sequence of the disclosure. In some embodiments, a mutation can occur in any region of a reference gRNA scaffold to produce a gRNA variant. In some embodiments, the scaffold of the gRNA variant sequence has at least 20%, at least 30%, at least 40%, at least 50%, at least 60%, or at least 70%, at least 80%, at least 85%, at least about 90%, at least about 95%, at least about 96%, at least about 97%, at least about 98%, or at least about 99% identity to the sequence of SEQ ID NO: 4 or SEQ ID NO: 5. In other embodiments, a gRNA variant comprises one or more nucleotide substitutions, insertions, deletions, or swapped or replaced regions relative to a gRNA variant sequence of the disclosure. In some embodiments, the scaffold of the gRNA variant sequence has at least 50%, at least 60%, or at least 70%, at least 80%, at least 85%, at least about 90%, at least about 95%, at least about 96%, at least about 97%, at least about 98%, or at least about 99% identity to the sequence of SEQ ID NO: 2238 or SEQ ID NO: 2239.

[0161] In some embodiments, a gRNA variant comprises one or more nucleotide changes within one or more regions of the reference gRNA scaffold that improve a characteristic of the reference gRNA. In other embodiments, a gRNA variant comprises one or more nucleotide changes within one or more regions of the gRNA variant scaffold from which it was derived that improve a characteristic relative to that gRNA. Exemplary regions include the RNA triplex, the pseudoknot, the scaffold stem loop, and the extended stem loop. In some cases, the variant scaffold stem further comprises a bubble. In other cases, the variant scaffold further comprises a triplex loop region. In still other cases, the variant scaffold further comprises a 5′ unstructured region. In some embodiments, the gRNA variant scaffold comprises a scaffold stem loop having at least 60% sequence identity, at least 70% sequence identity, at least 80% sequence identity, at least 90% sequence identity, at least 95% sequence identity, or at least 99% sequence identity to SEQ ID NO: 14. In other embodiments, the gRNA variant comprises a scaffold stem loop having the sequence of CCAGCGACUAUGUCGUAGUGG (SEQ ID NO: 245). In other embodiments, the disclosure provides a gRNA scaffold comprising, relative to SEQ ID NO: 5, one or more of a C18G substitution, a G55 insertion, a U1 deletion, and a modified extended stem loop in which the original 6 nt loop and 13 most-loop-proximal base pairs (32 nucleotides total) are replaced by a Uvsx hairpin (4 nt loop and 5 loop-proximal base pairs; 14 nucleotides total) and the loop-distal base of the extended stem is converted to a fully base-paired stem contiguous with the new Uvsx hairpin by deletion of the A99 and substitution of G65U. In the foregoing embodiment, the gRNA scaffold is gRNA variant 174 and comprises the sequence ACUGGCGCUUUUAUCUGAUUACUUUGAGAGCCAUCACCAGCGACUAUGUCGUAG UGGGUAAAGCUCCCUCUUCGGAGGGAGCAUCAAAG (SEQ ID NO: 2238).

[0162] All gRNA variants that have one or more improved characteristics, or add one or more new functions when the variant gRNA is compared to a reference gRNA or a gRNA variant that is mutagenized to create a new gRNA variant described herein, are envisaged as within the scope of the disclosure. A representative example of such a gRNA variant is guide 235 (SEQ ID NO: 2292), the design of which is described in the Examples. In some embodiments, the gRNA variant adds a new function to the RNP comprising the gRNA variant. In some embodiments, the gRNA variant has an improved characteristic selected from: increased stability; increased transcription of the gRNA; increased resistance to nuclease activity; increased folding rate of the gRNA; decreased side product formation during folding; increased productive folding; increased binding affinity to a CasX protein; increased binding affinity to a target nucleic acid when complexed with a CasX protein; increased gene editing when complexed with a CasX protein; increased specificity of editing of the target nucleic acid when complexed with a CasX protein; decreased off-target editing when complexed with a CasX protein; and increased ability to utilize a greater spectrum of one or more PAM sequences, including ATC, CTC, GTC, or TTC, in the editing of target nucleic acid when complexed with a CasX protein, and any combination thereof. In some cases, the one or more of the improved characteristics of the gRNA variant is at least about 1.1 to about 100,000-fold increased relative to the reference gRNA of SEQ ID NO: 4 or SEQ ID NO: 5, or to gRNA variant 174 or 175. In other cases, the one or more improved characteristics of the gRNA variant is at least about 1.1, at least about 10, at least about 100, at least about 1000, at least about 10,000, at least about 100,000-fold or more increased relative to the reference gRNA of SEQ ID NO: 4 or SEQ ID NO: 5, or to gRNA variant 174 or 175. In other cases, the one or more of the improved characteristics of the gRNA variant is about 1.1 to 100,00-fold, about 1.1 to 10,00-fold, about 1.1 to 1,000-fold, about 1.1 to 500-fold, about 1.1 to 100-fold, about 1.1 to 50-fold, about 1.1 to 20-fold, about 10 to 100,00-fold, about 10 to 10,00-fold, about 10 to 1,000-fold, about 10 to 500-fold, about 10 to 100-fold, about 10 to 50-fold, about 10 to 20-fold, about 2 to 70-fold, about 2 to 50-fold, about 2 to 30-fold, about 2 to 20-fold, about 2 to 10-fold, about 5 to 50-fold, about 5 to 30-fold, about 5 to 10-fold, about 100 to 100,00-fold, about 100 to 10,00-fold, about 100 to 1,000-fold, about 100 to 500-fold, about 500 to 100,00-fold, about 500 to 10,00-fold, about 500 to 1,000-fold, about 500 to 750-fold, about 1,000 to 100,00-fold, about 10,000 to 100,00-fold, about 20 to 500-fold, about 20 to 250-fold, about 20 to 200-fold, about 20 to 100-fold, about 20 to 50-fold, about 50 to 10,000-fold, about 50 to 1,000-fold, about 50 to 500-fold, about 50 to 200-fold, or about 50 to 100-fold, increased relative to the reference gRNA of SEQ ID NO: 4 or SEQ ID NO: 5, or to gRNA variant 174 or 175. In other cases, the one or more improved characteristics of the gRNA variant is about 1.1-fold, 1.2-fold, 1.3-fold, 1.4-fold, 1.5-fold, 1.6-fold, 1.7-fold, 1.8-fold, 1.9-fold, 2-fold, 3-fold, 4-fold, 5-fold, 6-fold, 7-fold, 8-fold, 9-fold, 10-fold, 11-fold, 12-fold, 13-fold, 14-fold, 15-fold, 16-fold, 17-fold, 18-fold, 19-fold, 20-fold, 25-fold, 30-fold, 40-fold, 45-fold, 50-fold, 55-fold, 60-fold, 70-fold, 80-fold, 90-fold, 100-fold, 110-fold, 120-fold, 130-fold, 140-fold, 150-fold, 160-fold, 170-fold, 180-fold, 190-fold, 200-fold, 210-fold, 220-fold, 230-fold, 240-fold, 250-fold, 260-fold, 270-fold, 280-fold, 290-fold, 300-fold, 310-fold, 320-fold, 330-fold, 340-fold, 350-fold, 360-fold, 370-fold, 380-fold, 390-fold, 400-fold, 425-fold, 450-fold, 475-fold, or 500-fold increased relative to the reference gRNA of SEQ ID NO: 4 or SEQ ID NO: 5, or to gRNA variant 174 or 175.

[0163] In some embodiments, a new gRNA variant can be created by subjecting a reference gRNA or a gRNA variant to a one or more mutagenesis methods, such as the mutagenesis methods described herein, in the Examples below, which may include Deep Mutational Evolution (DME), deep mutational scanning (DMS), error prone PCR, cassette mutagenesis, random mutagenesis, staggered extension PCR, gene shuffling, or domain swapping, in order to generate the gRNA variants of the disclosure. The activity of reference gRNAs or the gRNA variant subject to mutagenesis may be used as a benchmark against which the activity of gRNA variants are compared, thereby measuring improvements in function of gRNA variants. In other embodiments, a reference gRNA or a gRNA may be subjected to one or more deliberate, targeted mutations, substitutions, or domain swaps in order to produce a gRNA variant, for example a rationally designed variant. Exemplary gRNA variants produced by such methods are described in the Examples and representative sequences of gRNA scaffolds are presented in Table 2.

[0164] In some embodiments, the gRNA variant comprises one or more modifications compared to a reference gRNA or a gRNA variant scaffold sequence, wherein the one or more modification is selected from: at least one nucleotide substitution in a region of the gRNA; at least one nucleotide deletion in a region of the gRNA; at least one nucleotide insertion in a region of the gRNA; a substitution of all or a portion of a region of the gRNA; a deletion of all or a portion of a region of the gRNA; or any combination of the foregoing. In some cases, the modification is a substitution of 1 to 15 consecutive or non-consecutive nucleotides in one or more regions of the gRNA. In other cases, the modification is a deletion of 1 to 10 consecutive or non-consecutive nucleotides in the gRNA in one or more regions. In other cases, the modification is an insertion of 1 to 10 consecutive or non-consecutive nucleotides in the gRNA in one or more regions. In other cases, the modification is a substitution of the scaffold stem loop or the extended stem loop with an RNA stem loop sequence from a heterologous RNA source with proximal 5′ and 3′ ends. In some cases, a gRNA variant of the disclosure comprises two or more modifications in one region relative to a reference gRNA or a gRNA variant. In other cases, a gRNA variant of the disclosure comprises modifications in two or more regions. In other cases, a gRNA variant comprises any combination of the foregoing modifications described in this paragraph.

[0165] In some embodiments, a 5′ G is added to a gRNA variant sequence, relative to the original gRNA, for expression in vivo, as transcription from a U6 promoter is more efficient and more consistent with regard to the start site when the +1 nucleotide is a G. In other embodiments, two 5′ Gs are added to generate a gRNA variant sequence for in vitro transcription to increase production efficiency, as T7 polymerase strongly prefers a G in the +1 position and a purine in the +2 position. In some cases, the 5′ G bases are added to the reference scaffolds of Table 1. In other cases, the 5′ G bases are added to the variant scaffolds of Table 2.

[0166] Table 2 provides exemplary gRNA variant scaffold sequences. In some embodiments, the gRNA variant scaffold comprises any one of the sequences SEQ ID NOS: 2101-2332 or 2353-2398 as listed in Table 2, or a sequence having at least about 50%, at least about 60%, at least about 70%, at least about 80%, at least about 90%, at least about 95%, at least about 95%, at least about 96%, at least about 97%, at least about 98%, at least about 99% sequence identity thereto. In some embodiments, the gRNA variant scaffold comprises any one of the sequences SEQ ID NOS: 2238-2332 or 2353-2398, or a sequence having at least about 50%, at least about 60%, at least about 70%, at least about 80%, at least about 90%, at least about 95%, at least about 95%, at least about 96%, at least about 97%, at least about 98%, at least about 99% sequence identity thereto. In some embodiments, the gRNA variant scaffold comprises any one of the sequences SEQ ID NOS: 2281-2332 or 2353-2398, or a sequence having at least about 50%, at least about 60%, at least about 70%, at least about 80%, at least about 90%, at least about 95%, at least about 95%, at least about 96%, at least about 97%, at least about 98%, at least about 99% sequence identity thereto. It will be understood that in those embodiments wherein a vector comprises a DNA encoding sequence for a gRNA, or where a gRNA is a chimera of RNA and DNA, that thymine (T) bases can be substituted for the uracil (U) bases of any of the gRNA sequence embodiments described herein.

TABLE 2
Exemplary gRNA Variant Scaffold Sequences

| SEQ | | |
|---|---|---|
| ID | | |
| NO: | Name | NUCLEOTIDE SEQUENCE OR DESCRIPTION OF MODIFICATION |
| 2101 | ND | phage replication stable |
| 2102 | ND | Kissing loop_b1 |
| 2103 | ND | Kissing loop_a |
| 2104 | ND | 32: uvsX hairpin |
| 2105 | ND | PP7 |
| 2106 | ND | 64: trip mut, extended stem truncation |
| 2107 | ND | hyperstable tetraloop |
| 2108 | ND | C18G |
| 2109 | ND | U17G |
| 2110 | ND | CUUCGG loop |
| 2111 | ND | MS2 |
| 2112 | ND | −1, A2G, −78, G77U |
| 2113 | ND | QB |
| 2114 | ND | 45, 44 hairpin |
| 2115 | ND | U1A |
| 2116 | ND | A14C, U17G |
| 2117 | ND | CUUCGG loop modified |
| 2118 | ND | Kissing loop_b2 |
| 2119 | ND | −76:78, −83:87 |
| 2120 | ND | −4 |
| 2121 | ND | extended stem truncation |
| 2122 | ND | C55 |
| 2123 | ND | trip mut |
| 2124 | ND | −76:78 |
| 2125 | ND | −1:5 |
| 2126 | ND | −83:87 |
| 2127 | ND | =+G28, A82U, −84, |
| 2128 | ND | =+51U |
| 2129 | ND | −1:4, +G5A, +G86, |
| 2130 | ND | =+A94 |
| 2131 | ND | =+G72 |
| 2132 | ND | shorten front, CUUCGG loop modified. extend extended |
| 2133 | ND | A14C |
| 2134 | ND | −1:3, +G3 |
| 2135 | ND | =+C45, +U46 |
| 2136 | ND | CUUCGG loop modified, fun start |
| 2137 | ND | 93:94 |
| 2138 | ND | =+U45 |
| 2139 | ND | −69, −94 |
| 2140 | ND | −94 |
| 2141 | ND | modified CUUCGG, minus U in 1st triplex |
| 2142 | ND | −1:4, +C4, A14C, U17G, +G72, −76:78, −83:87 |
| 2143 | ND | U1C, −73 |
| 2144 | ND | Scaffold uuCG, stem uuCG. Stem swap, t shorten |
| 2145 | ND | Scaffold uuCG, stem uuCG. Stem swap |
| 2146 | ND | =+G60 |
| 2147 | ND | no stem Scaffold uuCG |
| 2148 | ND | no stem Scaffold uuCG, fun start |
| 2149 | ND | Scaffold uuCG, stem uuCG, fun start |
| 2150 | ND | Pseudoknots |
| 2151 | ND | Scaffold uuCG, stem uuCG |
| 2152 | ND | Scaffold uuCG, stem uuCG, no start |
| 2153 | ND | Scaffold uuCG |
| 2154 | ND | =+GCUC36 |
| 2155 | ND | G quadriplex telomere basket+ ends |
| 2156 | ND | G quadriplex M3q |
| 2157 | ND | G quadriplex telomere basket no ends |
| 2158 | ND | 45, 44 hairpin (old version) |
| 2159 | ND | Sarcin-ricin loop |
| 2160 | ND | uvsX, C18G |
| 2161 | ND | truncated stem loop, C18G, trip mut (U10C) |
| 2162 | ND | short phage rep, C18G |
| 2163 | ND | phage rep loop, C18G |
| 2164 | ND | =+G18, stacked onto 64 |
| 2165 | ND | truncated stem loop, C18G, −1 A2G |
| 2166 | ND | phage rep loop, C18G, trip mut (U10C) |
| 2167 | ND | short phage rep, C18G, trip mut (U10C) |
| 2168 | ND | uvsX, trip mut (U10C) |
| 2169 | ND | truncated stem loop |
| 2170 | ND | =+A17, stacked onto 64 |
| 2171 | ND | 3′ HDV genomic ribozyme |
| 2172 | ND | phage rep loop, trip mut (U10C) |
| 2173 | ND | −79:80 |
| 2174 | ND | short phage rep, trip mut (U10C) |
| 2175 | ND | extra truncated stem loop |
| 2176 | ND | U17G, C18G |
| 2177 | ND | short phage rep |
| 2178 | ND | uvsX, C18G, −1 A2G |
| 2179 | ND | uvsX, C18G, trip mut (U10C), −1 A2G, HDV −99 G65U |
| 2180 | ND | 3′ HDV antigenomic ribozyme |
| 2181 | ND | uvsX, C18G, trip mut (U10C), −1 A2G, HDV AA(98:99)C |
| 2182 | ND | 3′ HDV ribozyme (Lior Nissim, Timothy Lu) |
| 2183 | ND | TAC(1:3)GA, stacked onto 64 |
| 2184 | ND | uvsX, −1 A2G |
| 2185 | ND | truncated stem loop, C18G, trip mut (U10C), −1 A2G, HDV −99 G65U |
| 2186 | ND | short phage rep, C18G, trip mut (U10C), −1 A2G, HDV −99 G65U |
| 2187 | ND | 3′ sTRSV WT viral Hammerhead ribozyme |
| 2188 | ND | short phage rep, C18G, −1 A2G |
| 2189 | ND | short phage rep, C18G, trip mut (U10C), −1 A2G, 3′ genomic HDV |
| 2190 | ND | phage rep loop, C18G, trip mut (U10C), −1 A2G, HDV −99 G65U |
| 2191 | ND | 3′ HDV ribozyme (Owen Ryan, Jamie Cate) |
| 2192 | ND | phage rep loop, C18G, −1 A2G |
| 2193 | ND | 0.14 |
| 2194 | ND | −78, G77U |
| 2195 | ND | ND |
| 2196 | ND | short phage rep, −1 A2G |
| 2197 | ND | truncated stem loop, C18G, trip mut (U10C), −1 A2G |
| 2198 | ND | −1, A2G |
| 2199 | ND | truncated stem loop, trip mut (U10C), −1 A2G |
| 2200 | ND | uvsX, C18G, trip mut (U10C), −1A2G |
| 2201 | ND | phage rep loop, −1 A2G |
| 2202 | ND | phage rep loop, trip mut (U10C), −1 A2G |
| 2203 | ND | phage rep loop, C18G, trip mut (U10C), −1 A2G |
| 2204 | ND | truncated stem loop, C18G |
| 2205 | ND | uvsX, trip mut (U10C), −1 A2G |
| 2206 | ND | truncated stem loop, −1 A2G |
| 2207 | ND | short phage rep, trip mut (U10C), −1A2G |
| 2208 | ND | 5′HDV ribozyme (Owen Ryan, Jamie Cate) |
| 2209 | ND | 5′HDV genomic ribozyme |
| 2210 | ND | truncated stem loop, C18G, trip mut (U10C), −1A2G, HDV AA(98:99)C |
| 2211 | ND | 5′env25 pistol ribozyme (with an added CUUCGG loop) |
| 2212 | ND | 5′HDV antigenomic ribozyme |
| 2213 | ND | 3′ Hammerhead ribozyme (Lior Nissim, Timothy Lu) guide |
| | | scaffold scar |
| 2214 | ND | =+A27, stacked onto 64 |
| 2215 | ND | 5′Hammerhead ribozyme (Lior Nissim, Timothy Lu) smaller scar |
| 2216 | ND | phage rep loop, C18G, trip mut (U10C), −1A2G, HDV AA(98:99)C |
| 2217 | ND | −27, stacked onto 64 |
| 2218 | ND | 3′ Hatchet |
| 2219 | ND | 3′ Hammerhead ribozyme (Lior Nissim, Timothy Lu) |
| 2220 | ND | 5′ Hatchet |
| 2221 | ND | 5′ HDV ribozyme (Lior Nissim, Timothy Lu) |
| 2222 | ND | 5′ Hammerhead ribozyme (Lior Nissim, Timothy Lu) |
| 2223 | ND | 3′ HH15 Minimal Hammerhead ribozyme |
| 2224 | ND | 5′ RBMX recruiting motif |
| 2225 | ND | 3′ Hammerhead ribozyme (Lior Nissim, Timothy Lu) smaller scar |
| 2226 | ND | 3′ env25 pistol ribozyme (with an added CUUCGG loop) |
| 2227 | ND | 3′ Env−9 Twister |
| 2228 | ND | =+AUUAUCUCAUUACU25 |
| 2229 | ND | 5′ Env−9 Twister |
| 2230 | ND | 3′ Twisted Sister 1 |
| 2231 | ND | no stem |
| 2232 | ND | 5′ HH15 Minimal Hammerhead ribozyme |
| 2233 | ND | 5′ Hammerhead ribozyme (Lior Nissim, Timothy Lu) guide |
| | | scaffold scar |
| 2234 | ND | 5′ Twisted Sister 1 |
| 2235 | ND | 5′ sTRSV WT viral Hammerhead ribozyme |
| 2236 | ND | 148: = +G55, stacked onto 64 |
| 2237 | ND | 158: 103+148(+G55) −99, G65U |
| 2238 | 174 | ACUGGCGCUUUUAUCUGAUUACUUUGAGAGCCAUCACCAGCGACUAUGUCGUAG |
| | | UGGGUAAAGCUCCCUCUUCGGAGGGAGCAUCAAAG |
| 2239 | 175 | ACUGGCGCCUUUAUCUCAUUACUUUGAGAGCCAUCACCAGCGACUAUGUCGUAU |
| | | GGGUAAAGCGCUUACGGACUUCGGUCCGUAAGAAGCAUCAAAG |
| 2240 | 176 | GCUGGCGCUUUUAUCUGAUUACUUUGAGAGCCAUCACCAGCGACUAUGUCGUAG |
| | | UGGGUAAAGCUCCCUCUUCGGAGGGAGCAUCAAAG |
| 2241 | 177 | ACUGGCGCUUUUAUCUGAUUACUUUGAGAGCCAUCACCAGCGACUAUGUCGUAU |
| | | GGGUAAAGCUCCCUCUUCGGAGGGAGCAUCAAAG |
| 2242 | 181 | ACUGGCGCCUUUAUCUGAUUACUUUGAGAGCCAUCACCAGCGACUAUGUCGUAU |
| | | GGGUAAAGCGCUUACGGACUUCGGUCCGUAAGAAGCAUCAAAG |
| 2243 | 182 | ACUGGCGCUUUUAUCUGAUUACUUUGAGAGCCAUCACCAGCGACUAUGUCGUAU |
| | | GGGUAAAGCGCUUACGGACUUCGGUCCGUAAGAAGCAUCAAAG |
| 2244 | 183 | ACUGGCGCUUUUAUCUGAUUACUUUGAGAGCCAUCACCAGCGACUAUGUCGUAG |
| | | UGGGUAAAGCGCUUACGGACUUCGGUCCGUAAGAAGCAUCAAAG |
| 2245 | 184 | ACUGGCGCUUUUAUCUGAUUACUUUGAGAGCCAUCACCAGCGACUAUGUCGUAU |
| | | UGGGUAAAGCUCCCUCUUCGGAGGGAGCAUCAAAG |
| 2246 | 185 | ACUGGCGCUUUUAUCUGAUUACUUUGAGAGCCAUCACCAGCGACUAUGUCGUAU |
| | | UGGGUAAAGCGCUUACGGACUUCGGUCCGUAAGAAGCAUCAAAG |
| 2247 | 186 | ACUGGCGCCUUUAUCAUCAUUACUUUGAGAGCCAUCACCAGCGACUAUGUCGUA |
| | | UGGGUAAAGCGCUUACGGACUUCGGUCCGUAAGAAGCAUCAAAG |
| 2248 | 187 | ACUGGCGCUUUUAUCUGAUUACUUUGAGAGCCAUCACCAGCGACUAUGUCGUAG |
| | | UGGGUAAAGCGCCCUCUUCGGAGGGAAGCAUCAAAG |
| 2249 | 188 | ACUGGCGCUUUUAUCUGAUUACUUUGAGAGCCAUCACCAGCGACUAUGUCGUAG |
| | | UGGGUAAAGCUCACAUGAGGAUCACCCAUGUGAGCAUCAAAG |
| 2250 | 189 | ACUGGCACUUUUACCUGAUUACUUUGAGAGCCAACACCAGCGACUAUGUCGUAG |
| | | UGGGUAAAGCUCCCUCUUCGGAGGGAGCAUCAAAG |
| 2251 | 190 | ACUGGCACUUUUAUCUGAUUACUUUGAGAGCCAUCACCAGCGACUAUGUCGUAG |
| | | UGGGUAAAGCUCCCUCUUCGGAGGGAGCAUCAAAG |
| 2252 | 191 | ACUGGCCCUUUUAUCUGAUUACUUUGAGAGCCAUCACCAGCGACUAUGUCGUAG |
| | | UGGGUAAAGCUCCCUCUUCGGAGGGAGCAUCAAAG |
| 2253 | 192 | ACUGGCGCUUUUACCUGAUUACUUUGAGAGCCAUCACCAGCGACUAUGUCGUAG |
| | | UGGGUAAAGCUCCCUCUUCGGAGGGAGCAUCAAAG |
| 2254 | 193 | ACUGGCGCUUUUAUCUGAUUACUUUGAGAGCCAACACCAGCGACUAUGUCGUAG |
| | | UGGGUAAAGCUCCCUCUUCGGAGGGAGCAUCAAAG |
| 2255 | 195 | ACUGGCACCUUUACCUGAUUACUUUGAGAGCCAACACCAGCGACUAUGUCGUAU |
| | | GGGUAAAGCGCUUACGGACUUCGGUCCGUAAGAAGCAUCAAAG |
| 2256 | 196 | ACUGGCACCUUUAUCUGAUUACUUUGAGAGCCAUCACCAGCGACUAUGUCGUAU |
| | | GGGUAAAGCGCUUACGGACUUCGGUCCGUAAGAAGCAUCAAAG |
| 2257 | 197 | ACUGGCCCCUUUAUCUGAUUACUUUGAGAGCCAUCACCAGCGACUAUGUCGUAU |
| | | GGGUAAAGCGCUUACGGACUUCGGUCCGUAAGAAGCAUCAAAG |
| 2258 | 198 | ACUGGCGCCUUUAUCUGAUUACUUUGAGAGCCAACACCAGCGACUAUGUCGUAU |
| | | GGGUAAAGCGCUUACGGACUUCGGUCCGUAAGAAGCAUCAAAG |
| 2259 | 199 | GCUGGCGCUUUUAUCUGAUUACUUUGAGAGCCAUCACCAGCGACUAUGUCGUAG |
| | | UGGGUAAAGCUCCCUCUUCGGAGGGAGCAUCAAAG |
| 2260 | 200 | GACUGGCGCUUUUAUCUGAUUACUUUGAGAGCCAUCACCAGCGACUAUGUCGUA |
| | | GUGGGUAAAGCUCCCUCUUCGGAGGGAGCAUCAAAG |
| 2261 | 201 | ACUGGCGCCUUUAUCUGAUUACUUUGGAGAGCCAUCACCAGCGACUAUGUCGUA |
| | | GUGGGUAAAGCUCCCUCUUCGGAGGGAGCAUCAAAG |
| 2262 | 202 | ACUGGCGCAUUUAUCUGAUUACUUUGUGAGCCAUCACCAGCGACUAUGUCGUAG |
| | | UGGGUAAAGCUCCCUCUUCGGAGGGAGCAUCAAAG |
| 2263 | 203 | ACUGGCGCCUUUAUCUGAUUACUUUGAGAGCCAUCACCAGCGACUAUGUCGUAG |
| | | UGGGUAAAGCUCCCUCUUCGGAGGGAGCAUCAAAG |
| 2264 | 204 | ACUGGCGCUUUUAUCUGAUUACUUUGGAGAGCCAUCACCAGCGACUAUGUCGUA |
| | | GUGGGUAAAGCUCCCUCUUCGGAGGGAGCAUCAAAG |
| 2265 | 205 | ACUGGCGCAUUUAUCUGAUUACUUUGAGAGCCAUCACCAGCGACUAUGUCGUAG |
| | | UGGGUAAAGCUCCCUCUUCGGAGGGAGCAUCAAAG |
| 2266 | 206 | ACUGGCGCUUUUAUCUGAUUACUUUGUGAGCCAUCACCAGCGACUAUGUCGUAG |
| | | UGGGUAAAGCUCCCUCUUCGGAGGGAGCAUCAAAG |
| 2267 | 207 | ACUGGCGCUUUUAUUCUGAUUACUUUGAGAGCCAUCACCAGCGACUAUGUCGUA |
| | | GUGGGUAAAGCUCCCUCUUCGGAGGGAGCAUCAAAG |
| 2268 | 208 | ACGGCGCUUUUAUCUGAUUACUUUGAGAGCCAUCACCAGCGACUAUGUCGUAGU |
| | | GGGUAAAGCUCCCUCUUCGGAGGGAGCAUCAAAG |
| 2269 | 209 | ACUGGCGCUUUUAUAUGAUUACUUUGAGAGCCAUCACCAGCGACUAUGUCGUAG |
| | | UGGGUAAAGCUCCCUCUUCGGAGGGAGCAUCAAAG |
| 2270 | 210 | ACUGGCGCUUUUAUCUUGAUUACUUUGAGAGCCAUCACCAGCGACUAUGUCGUA |
| | | GUGGGUAAAGCUCCCUCUUCGGAGGGAGCAUCAAAG |
| 2271 | 211 | ACUGGCGCUUUUAUCUGAUUACUUUGAGAGCCAGCACCAGCGACUAUGUCGUAG |
| | | UGGGUAAAGCUCCCUCUUCGGAGGGAGCAUCAAAG |
| 2272 | 212 | ACUGGCGCUGUUAUCUGAUUACUUCGAGAGCCAUCACCAGCGACUAUGUCGUAG |
| | | UGGGUAAAGCUCCCUCUUCGGAGGGAGCAUCGAAG |
| 2273 | 213 | ACUGGCGCUCUUAUCUGAUUACUUCGAGAGCCAUCACCAGCGACUAUGUCGUAG |
| | | UGGGUAAAGCUCCCUCUUCGGAGGGAGCAUCGAAG |
| 2274 | 214 | ACUGGCGCUUGUAUCUGAUUACUCUGAGAGCCAUCACCAGCGACUAUGUCGUAG |
| | | UGGGUAAAGCUCCCUCUUCGGAGGGAGCAUCAGAG |
| 2275 | 215 | ACUGGCGCUUCUAUCUGAUUACUCUGAGAGCCAUCACCAGCGACUAUGUCGUAG |
| | | UGGGUAAAGCUCCCUCUUCGGAGGGAGCAUCAGAG |
| 2276 | 216 | ACUGGCGCUUUGAUCUGAUUACCUUGAGAGCCAUCACCAGCGACUAUGUCGUAG |
| | | UGGGUAAAGCUCCCUCUUCGGAGGGAGCAUCAAGG |
| 2277 | 217 | ACUGGCGCUUUCAUCUGAUUACCUUGAGAGCCAUCACCAGCGACUAUGUCGUAG |
| | | UGGGUAAAGCUCCCUCUUCGGAGGGAGCAUCAAGG |
| 2278 | 218 | ACUGGCGCUGUUAUCUGAUUACUUUGAGAGCCAUCACCAGCGACUAUGUCGUAG |
| | | UGGGUAAAGCUCCCUCUUCGGAGGGAGCAUCAAAG |
| 2279 | 219 | ACUGGCGCUUUUAUCUGAUUACUUUGAGAGCCAUCACCAGCGACUAUGUCGUAG |
| | | UGGGUAAAGCUCCCUCUUCGGAGGGAGCAUCGAAG |
| 2280 | 220 | ACUGGCGCUUUUAUCUGAUUACUUCGAGAGCCAUCACCAGCGACUAUGUCGUAG |
| | | UGGGUAAAGCUCCCUCUUCGGAGGGAGCAUCAAAG |
| 2281 | 221 | ACUGGCACUUCUAUCUGAUUACUCUGAGAGCCAUCACCAGCGACUAUGUCGUAU |
| | | GGGUAAAGCCGCUUACGGACUUCGGUCCGUAAGAGGCAUCAGAG |
| 2282 | 222 | ACUGGCACUUCUAUCUGAUUACUCUGAGAGCCAUCACCAGCGACUAUGUCGUAG |
| | | UGGGUAAAGCUCCCUCUUCGGAGGGAGCAUCAGAG |
| 2283 | 223 | ACUGGCACCUUUAUCUGAUUACUUUGAGAGCCAUCACCAGCGACUAUGUCGUAU |
| | | GGGUAAAGCCGCUUACGGACUUCGGUCCGUAAGAGGCAUCAAAG |
| 2284 | 224 | ACUGGCACUUGUAUCUGAUUACUCUGAGAGCCAUCACCAGCGACUAUGUCGUAU |
| | | GGGUAAAGCCGCUUACGGACUUCGGUCCGUAAGAGGCAUCAGAG |
| 2285 | 225 | ACUGGCACUUGUAUCUGAUUACUCUGAGAGCCAUCACCAGCGACUAUGUCGUAG |
| | | UGGGUAAAGCUCCCUCUUCGGAGGGAGCAUCAGAG |
| 2332 | 226 | ACUGGCGCUUUUAUCUGAUUACUUUGAGAGCCAUCACCAGCGACUAUGUCGUAG |
| | | UGGGUAAAGCUGCACUAUGGGCGCAGCGUCAAUGACGCUGACGGUACAGGCCAG |
| | | ACAAUUAUUGUCUGGUAUAGUGCAGCAUCAAAG |
| 2286 | 229 | ACUGGCACUUUUAUCUGAUUACUUUGAGAGCCAUCACCAGCGACUAUGUCGUAU |
| | | GGGUAAAGCGCUUACGGACUUCGGUCCGUAAGAAGCAUCAAAG |
| 2287 | 230 | ACUGGCACUUCUAUCUGAUUACUCUGAGAGCCAUCACCAGCGACUAUGUCGUAU |
| | | GGGUAAAGCGCUUACGGACUUCGGUCCGUAAGAAGCAUCAGAG |
| 2288 | 231 | ACUGGCGCUUCUAUCUGAUUACUCUGAGAGCCAUCACCAGCGACUAUGUCGUAU |
| | | GGGUAAAGCCGCUUACGGACUUCGGUCCGUAAGAGGCAUCAGAG |
| 2289 | 232 | ACUGGCACUUCUAUCUGAUUACUCUGAGCGCCAUCACCAGCGACUAUGUCGUAU |
| | | GGGUAAAGCCGCUUACGGACUUCGGUCCGUAAGAGGCAUCAGAG |
| 2290 | 233 | ACUGGCGCUUCUAUCUGAUUACUCUGAGCGCCAUCACCAGCGACUAUGUCGUAU |
| | | GGGUAAAGCCGCUUACGGACUUCGGUCCGUAAGAGGCAUCAGAG |
| 2291 | 234 | ACUGGCGCUUCUAUCUGAUUACUCUGAGCGCCAUCACCAGCGACUAUGUCGUAU |
| | | GGGUAAAGCGCCUUACGGACUUCGGUCCGUAAGGAGCAUCAGAG |
| 2292 | 235 | ACUGGCGCUUCUAUCUGAUUACUCUGAGCGCCAUCACCAGCGACUAUGUCGUAG |
| | | UGGGUAAAGCCGCUUACGGACUUCGGUCCGUAAGAGGCAUCAGAG |
| 2293 | 236 | ACGGGACUUUCUAUCUGAUUACUCUGAAGUCCCUCACCAGCGACUAUGUCGUAU |
| | | GGGUAAAGCCGCUUACGGACUUCGGUCCGUAAGAGGCAUCAGAG |
| 2294 | 237 | ACCUGUAGUUCUAUCUGAUUACUCUGACUACAGUCACCAGCGACUAUGUCGUAU |
| | | GGGUAAAGCCGCUUACGGACUUCGGUCCGUAAGAGGCAUCAGAG |
| 2295 | 238 | ACUGGCGCUUUUAUCUGAUUACUUUGAGAGCCAUCACCAGCGACUAUGUCGUAG |
| | | UGGGUAAAGCUGCACGGUGGGCGCAGCUUCGGCUGACGGUACACCGUGCAGCAU |
| | | CAAAG |
| 2296 | 239 | ACUGGCGCUUUUAUCUGAUUACUUUGAGAGCCAUCACCAGCGACUAUGUCGUAG |
| | | UGGGUAAAGCUGCACGGUGGGCGCAGCUUCGGCUGACGGUACACCGGUGGGCGC |
| | | AGCUUCGGCUGACGGUACACCGUGCAGCAUCAAAG |
| 2297 | 240 | ACUGGCGCUUUUAUCUGAUUACUUUGAGAGCCAUCACCAGCGACUAUGUCGUAG |
| | | UGGGUAAAGCUGCACGGUGGGCGCAGCUUCGGCUGACGGUACACCGGUGGGCGC |
| | | AGCUUCGGCUGACGGUACACCGGUGGGCGCAGCUUCGGCUGACGGUACACCGUG |
| | | CAGCAUCAAAG |
| 2298 | 241 | ACUGGCGCUUUUAUCUGAUUACUUUGAGAGCCAUCACCAGCGACUAUGUCGUAG |
| | | UGGGUAAAGCUGCACGGUGGGCGCAGCUUCGGCUGACGGUACACCGGUGGGCGC |
| | | AGCUUCGGCUGACGGUACACCGGUGGGCGCAGCUUCGGCUGACGGUACACCGGU |
| | | GGGCGCAGCUUCGGCUGACGGUACACCGUGCAGCAUCAAAG |
| 2299 | 242 | ACUGGCGCUUUUAUCUGAUUACUUUGAGAGCCAUCACCAGCGACUAUGUCGUAG |
| | | UGGGUAAAGCUGCACGGUGGGCGCAGCUUCGGCUGACGGUACACCGGUGGGCGC |
| | | AGCUUCGGCUGACGGUACACCGGUGGGCGCAGCUUCGGCUGACGGUACACCGGU |
| | | GGGCGCAGCUUCGGCUGACGGUACACCGGUGGGCGCAGCUUCGGCUGACGGUAC |
| | | ACCGUGCAGCAUCAAAG |
| 2300 | 243 | ACUGGCGCUUUUAUCUGAUUACUUUGAGAGCCAUCACCAGCGACUAUGUCGUAG |
| | | UGGGUAAAGCUGCACCUAGCGGAGGCUAGGUGCAGCAUCAAAG |
| 2301 | 244 | ACUGGCGCUUUUAUCUGAUUACUUUGAGAGCCAUCACCAGCGACUAUGUCGUAG |
| | | UGGGUAAAGCUGCACCUCGGCUUGCUGAAGCGCGCACGGCAAGAGGCGAGGUGC |
| | | AGCAUCAAAG |
| 2302 | 245 | ACUGGCGCUUUUAUCUGAUUACUUUGAGAGCCAUCACCAGCGACUAUGUCGUAG |
| | | UGGGUAAAGCUGCACCUCUCUCGACGCAGGACUCGGCUUGCUGAAGCGCGCACG |
| | | GCAAGAGGCGAGGGGCGGCGACUGGUGAGUACGCCAAAAAUUUUGACUAGCGGA |
| | | GGCUAGAAGGAGAGAGGUGCAGCAUCAAAG |
| 2303 | 246 | ACUGGCGCUUUUAUCUGAUUACUUUGAGAGCCAUCACCAGCGACUAUGUCGUAG |
| | | UGGGUAAAGCUGCACGGUGCCCGUCUGUUGUGUCGAGAGACGCCAAAAAUUUUG |
| | | ACUAGCGGAGGCUAGAAGGAGAGAGAUGGGUGCCGUGCAGCAUCAAAG |
| 2304 | 247 | ACUGGCGCUUUUAUCUGAUUACUUUGAGAGCCAUCACCAGCGACUAUGUCGUAG |
| | | UGGGUAAAGCUGCACAUGGAGAGGAGAUGUGCAGCAUCAAAG |
| 2305 | 248 | ACUGGCGCUUUUAUCUGAUUACUUUGAGAGCCAUCACCAGCGACUAUGUCGUAG |
| | | UGGGUAAAGCUGCACAUGGAGAUGUGCAGCAUCAAAG |
| 2306 | 249 | ACUGGCGCUUUUAUCUGAUUACUUUGAGAGCCAUCACCAGCGACUAUGUCGUAG |
| | | UGGGUAAAGCUUGGGCGCAGCGUCAAUGACGCUGACGGUACAAGCAUCAAAG |
| 2307 | 250 | ACUGGCGCUUUUAUCUGAUUACUUUGAGAGCCAUCACCAGCGACUAUGUCGUAG |
| | | UGGGUAAAGCUGCACUAUGGGCGCAGCGUCAAUGACGCUGACGGUACAGGCCAC |
| | | AUGAGGAUCACCCAUGUGGUAUAGUGCAGCAUCAAAG |
| 2308 | 251 | ACUGGCGCUUUUAUCUGAUUACUUUGAGAGCCAUCACCAGCGACUAUGUCGUAG |
| | | UGGGUAAAGCUGCACUAUGGGCGCAGCUCAUGAGGAUCACCCAUGAGCUGACGG |
| | | UACAGGCCACAUGAGGAUCACCCAUGUGGUAUAGUGCAGCAUCAAAG |
| 2309 | 252 | ACUGGCGCUUUUAUCUGAUUACUUUGAGAGCCAUCACCAGCGACUAUGUCGUAG |
| | | UGGGUAAAGCUGCACUAUGGGCGCAGCGUCAAUGACGCUGACGGUACAGGCCAC |
| | | AUGGCAGUCGUAACGACGCGGGUGGUAUAGUGCAGCAUCAAAG |
| 2310 | 253 | ACUGGCGCUUUUAUCUGAUUACUUUGAGAGCCAUCACCAGCGACUAUGUCGUAG |
| | | UGGGUAAAGCUGCACUAUGGGCGCAGCAAACAUGGCAGUCCUAAGGACGCGGGU |
| | | UUUGCUGACGGUACAGGCCACAUGGCAGUCGUAACGACGCGGGUGGUAUAGUGC |
| | | AGCAUCAAAG |
| 2311 | 254 | ACUGGCGCUUUUAUCUGAUUACUUUGAGAGCCAUCACCAGCGACUAUGUCGUAG |
| | | UGGGUAAAGCUGCACUAUGGGCGCAGACAUGGCAGUCGUAACGACGCGGGUCUG |
| | | ACGGUACAGGCCACAUGAGGAUCACCCAUGUGGUAUAGUGCAGCAUCAAAG |
| 2312 | 255 | ACUGGCGCUUUUAUCUGAUUACUUUGAGAGCCAUCACCAGCGACUAUGUCGUAG |
| | | UGGGUAAAGCUGCACUAAGGAGUUUAUAUGGAAACCCUUAGUGCAGCAUCAAAG |
| 2313 | 256 | ACUGGCGCUUUUAUCUGAUUACUUUGAGAGCCAUCACCAGCGACUAUGUCGUAG |
| | | UGGGUAAAGCUCAGGAAGCACUAUGGGCGCAGCGUCAAUGACGCUGACGGUACA |
| | | GGCCAGACAAUUAUUGUCUGGUAUAGUGCAGCAGCAGAACAAUUUGCUGAGGGC |
| | | UAUUGAGGCGCAACAGCAUCUGUUGCAACUCACAGUCUGGGGCAUCAAGCAGCU |
| | | CCAGGCAAGAAUCCUGAGCAUCAAAG |
| 2314 | 257 | ACUGGCGCUUUUAUCUGAUUACUUUGAGAGCCAUCACCAGCGACUAUGUCGUAG |
| | | UGGGUAAAGCUGCACGCCCUGAAGAAGGGCGUGCAGCAUCAAAG |
| 2315 | 258 | ACUGGCGCUUUUAUCUGAUUACUUUGAGAGCCAUCACCAGCGACUAUGUCGUAG |
| | | UGGGUAAAGCUGCACGGCUCGUGUAGCUCAUUAGCUCCGAGCCGUGCAGCAUCA |
| | | AAG |
| 2316 | 259 | ACUGGCGCUUUUAUCUGAUUACUUUGAGAGCCAUCACCAGCGACUAUGUCGUAG |
| | | UGGGUAAAGCUGCACCCGUGUGCAUCCGCAGUGUCGGAUCCACGGGUGCAGCAU |
| | | CAAAG |
| 2317 | 260 | ACUGGCGCUUUUAUCUGAUUACUUUGAGAGCCAUCACCAGCGACUAUGUCGUAG |
| | | UGGGUAAAGCUGCACGGAAUCCAUUGCACUCCGGAUUUCACUAGGUGCAGCAUC |
| | | AAAG |
| 2318 | 261 | ACUGGCGCUUUUAUCUGAUUACUUUGAGAGCCAUCACCAGCGACUAUGUCGUAG |
| | | UGGGUAAAGCUGCACAUGCAUGUCUAAGACAGCAUGUGCAGCAUCAAAG |
| 2319 | 262 | ACUGGCGCUUUUAUCUGAUUACUUUGAGAGCCAUCACCAGCGACUAUGUCGUAG |
| | | UGGGUAAAGCUGCACAAAACAUAAGGAAAACCUAUGUUGUGCAGCAUCAAAG |
| 2320 | 263 | ACUGGCGCUUCUAUCUGAUUACUCUGAGCGCCAUCACCAGCGACUAUGUCGUAG |
| | | UGGGUAAAGCCGCUUACGGACUAUGGGCGCAGCGUCAAUGACGCUGACGGUACA |
| | | GGCCAGACAAUUAUUGUCUGGUAUAGUCCGUAAGAGGCAUCAGAG |
| 2321 | 264 | ACUGGCGCUUCUAUCUGAUUACUCUGAGCGCCAUCACCAGCGACUAUGUCGUAG |
| | | UGGGUAAAGCCGCUUACGGGUGGGCGCAGCGUCAAUGACGCUGACGGUACAGGC |
| | | CAGACAAUUAUUGUCUGGUACCCGUAAGAGGCAUCAGAG |
| 2322 | 265 | ACUGGCGCUUCUAUCUGAUUACUCUGAGCGCCAUCACCAGCGACUAUGUCGUAG |
| | | UGGGUAAAGCCGCUUACGGUAUGGGCGCAGCGUCAAUGACGCUGACGGUACAGG |
| | | CCACAUGAGGAUCACCCAUGUGGUAUACCGUAAGAGGCAUCAGAG |
| 2323 | 266 | ACUGGCGCUUUUAUCUGAUUACUUUGAGAGCCAUCACCAGCGACUAUGUCGUAG |
| | | UGGGUAAAGCUCCCUAUGGGCGCAGCGUCAAUGACGCUGACGGUACAGGCCACA |
| | | UGAGGAUCACCCAUGUGGUAUAGGGAGCAUCAAAG |
| 2324 | 267 | ACUGGCGCUUCUAUCUGAUUACUCUGAGCGCCAUCACCAGCGACUAUGUCGUAG |
| | | UGGGUAAAGCCGCUUACGGUAUGGGCGCAGCUCAUGAGGAUCACCCAUGAGCUG |
| | | ACGGUACAGGCCACAUGAGGAUCACCCAUGUGGUAUACCGUAAGAGGCAUCAGA |
| | | G |
| 2325 | 268 | ACUGGCGCUUUUAUCUGAUUACUUUGAGAGCCAUCACCAGCGACUAUGUCGUAG |
| | | UGGGUAAAGCUCCCUAUGGGCGCAGCUCAUGAGGAUCACCCAUGAGCUGACGGU |
| | | ACAGGCCACAUGAGGAUCACCCAUGUGGUAUAGGGAGCAUCAAAG |
| 2326 | 269 | ACUGGCGCUUCUAUCUGAUUACUCUGAGCGCCAUCACCAGCGACUAUGUCGUAG |
| | | UGGGUAAAGCCGCUUACGGUAUGGGCGCAGCGUCAAUGACGCUGACGGUACAGG |
| | | CCACAUGGCAGUCGUAACGACGCGGGUGGUAUACCGUAAGAGGCAUCAGAG |
| 2327 | 270 | ACUGGCGCUUUUAUCUGAUUACUUUGAGAGCCAUCACCAGCGACUAUGUCGUAG |
| | | UGGGUAAAGCUCCCUAUGGGCGCAGCGUCAAUGACGCUGACGGUACAGGCCACA |
| | | UGGCAGUCGUAACGACGCGGGUGGUAUAGGGAGCAUCAAAG |
| 2328 | 271 | ACUGGCGCUUCUAUCUGAUUACUCUGAGCGCCAUCACCAGCGACUAUGUCGUAG |
| | | UGGGUAAAGCCGCUUACGGUAUGGGCGCAGCAAACAUGGCAGUCCUAAGGACGC |
| | | GGGUUUUGCUGACGGUACAGGCCACAUGGCAGUCGUAACGACGCGGGUGGUAUA |
| | | CCGUAAGAGGCAUCAGAG |
| 2329 | 272 | ACUGGCGCUUUUAUCUGAUUACUUUGAGAGCCAUCACCAGCGACUAUGUCGUAG |
| | | UGGGUAAAGCUCCCUAUGGGCGCAGCAAACAUGGCAGUCCUAAGGACGCGGGUU |
| | | UUGCUGACGGUACAGGCCACAUGGCAGUCGUAACGACGCGGGUGGUAUAGGGAG |
| | | CAUCAAAG |
| 2330 | 273 | ACUGGCGCUUCUAUCUGAUUACUCUGAGCGCCAUCACCAGCGACUAUGUCGUAG |
| | | UGGGUAAAGCCGCUUACGGUAUGGGCGCAGACAUGGCAGUCGUAACGACGCGGG |
| | | UCUGACGGUACAGGCCACAUGAGGAUCACCCAUGUGGUAUACCGUAAGAGGCAU |
| | | CAGAG |
| 2331 | 274 | ACUGGCGCUUUUAUCUGAUUACUUUGAGAGCCAUCACCAGCGACUAUGUCGUAG |
| | | UGGGUAAAGCUCCCUAUGGGCGCAGACAUGGCAGUCGUAACGACGCGGGUCUGA |
| | | CGGUACAGGCCACAUGAGGAUCACCCAUGUGGUAUAGGGAGCAUCAAAG |
| 2353 | 275 | ACUGGCGCUUUUAUCUGAUUACUUUGAGAGCCAUCACCAGCGACUAUGU |
| | | CGUAGUGGGUAAAGCUGCACUAUGGGCGCAGCACCUGAGGAUCACCCAG |
| | | GUGCUGACGGUACAGGCCACCUGAGGAUCACCCAGGUGGUAUAGUGCAG |
| | | CAUCAAAG |
| 2354 | 276 | ACUGGCGCUUUUAUCUGAUUACUUUGAGAGCCAUCACCAGCGACUAUGU |
| | | CGUAGUGGGUAAAGCUGCACUAUGGGCGCAGCGCAUGAGGAUCACCCAU |
| | | GCGCUGACGGUACAGGCCGCAUGAGGAUCACCCAUGCGGUAUAGUGCAG |
| | | CAUCAAAG |
| 2355 | 277 | ACUGGCGCUUUUAUCUGAUUACUUUGAGAGCCAUCACCAGCGACUAUGU |
| | | CGUAGUGGGUAAAGCUGCACUAUGGGCGCAGCGCCUGAGGAUCACCCAG |
| | | GCGCUGACGGUACAGGCCGCCUGAGGAUCACCCAGGCGGUAUAGUGCAG |
| | | CAUCAAAG |
| 2356 | 278 | ACUGGCGCUUUUAUCUGAUUACUUUGAGAGCCAUCACCAGCGACUAUGU |
| | | CGUAGUGGGUAAAGCUGCACUAUGGGCGCAGCGCCUGAGCAUCAGCCAG |
| | | GCGCUGACGGUACAGGCCGCCUGAGCAUCAGCCAGGCGGUAUAGUGCAG |
| | | CAUCAAAG |
| 2357 | 279 | ACUGGCGCUUUUAUCUGAUUACUUUGAGAGCCAUCACCAGCGACUAUGU |
| | | CGUAGUGGGUAAAGCUGCACUAUGGGCGCAGCACAUGAGCAUCAGCCAU |
| | | GUGCUGACGGUACAGGCCACAUGAGCAUCAGCCAUGUGGUAUAGUGCAG |
| | | CAUCAAAG |
| 2358 | 280 | ACUGGCGCUUUUAUCUGAUUACUUUGAGAGCCAUCACCAGCGACUAUGU |
| | | CGUAGUGGGUAAAGCUGCACUAUGGGCGCAGCACAUGAGUAUCAACCAU |
| | | GUGCUGACGGUACAGGCCACAUGAGUAUCAACCAUGUGGUAUAGUGCAG |
| | | CAUCAAAG |
| 2359 | 281 | ACUGGCGCUUUUAUCUGAUUACUUUGAGAGCCAUCACCAGCGACUAUGU |
| | | CGUAGUGGGUAAAGCUGCACUAUGGGCGCAGCACAUGAGAAUCAGCCAU |
| | | GUGCUGACGGUACAGGCCACAUGAGAAUCAGCCAUGUGGUAUAGUGCAG |
| | | CAUCAAAG |
| 2360 | 282 | ACUGGCGCUUUUAUCUGAUUACUUUGAGAGCCAUCACCAGCGACUAUGU |
| | | CGUAGUGGGUAAAGCUGCACUAUGGGCGCAGCCCUUGAGGAUCACCCAU |
| | | GUGCUGACGGUACAGGCCCCUUGAGGAUCACCCAUGUGGUAUAGUGCAG |
| | | CAUCAAAG |
| 2361 | 283 | ACUGGCGCUUUUAUCUGAUUACUUUGAGAGCCAUCACCAGCGACUAUGU |
| | | CGUAGUGGGUAAAGCUGCACUAUGGGCGCAGCACUUGAGGAUCACCCAU |
| | | GUGCUGACGGUACAGGCCACUUGAGGAUCACCCAUGUGGUAUAGUGCAG |
| | | CAUCAAAG |
| 2362 | 284 | ACUGGCGCUUUUAUCUGAUUACUUUGAGAGCCAUCACCAGCGACUAUGU |
| | | CGUAGUGGGUAAAGCUGCACUAUGGGCGCAGCACCUGAGGAUCACCCAU |
| | | GUGCUGACGGUACAGGCCACCUGAGGAUCACCCAUGUGGUAUAGUGCAG |
| | | CAUCAAAG |
| 2363 | 285 | ACUGGCGCUUUUAUCUGAUUACUUUGAGAGCCAUCACCAGCGACUAUGUCGUAG |
| | | UGGGUAAAGCUGCACUAUGGGCGCAGCACAUGAGGAUCACCUAUGUGCUGACGG |
| | | UACAGGCCACAUGAGGAUCACCUAUGUGGUAUAGUGCAGCAUCAAAG |
| 2364 | 286 | ACUGGCGCUUUUAUCUGAUUACUUUGAGAGCCAUCACCAGCGACUAUGUCGUAG |
| | | UGGGUAAAGCUGCACUAUGGGCGCAGCACAUUAGGAUCACCAAUGUGCUGACGG |
| | | UACAGGCCACAUUAGGAUCACCAAUGUGGUAUAGUGCAGCAUCAAAG |
| 2365 | 287 | ACUGGCGCUUUUAUCUGAUUACUUUGAGAGCCAUCACCAGCGACUAUGUCGUAG |
| | | UGGGUAAAGCUGCACUAUGGGCGCAGCACAUUAGGAUCACCGAUGUGCUGACGG |
| | | UACAGGCCACAUUAGGAUCACCGAUGUGGUAUAGUGCAGCAUCAAAG |
| 2366 | 288 | ACUGGCGCUUUUAUCUGAUUACUUUGAGAGCCAUCACCAGCGACUAUGUCGUAG |
| | | UGGGUAAAGCUGCACUAUGGGCGCAGCACAUUAGGAUCACCUAUGUGCUGACGG |
| | | UACAGGCCACAUUAGGAUCACCUAUGUGGUAUAGUGCAGCAUCAAAG |
| 2367 | 289 | ACUGGCGCUUUUAUCUGAUUACUUUGAGAGCCAUCACCAGCGACUAUGUCGUAG |
| | | UGGGUAAAGCUGCACUAUGGGCGCAGCACAUGAGGAUUACCCAUGUGCUGACGG |
| | | UACAGGCCACAUGAGGAUUACCCAUGUGGUAUAGUGCAGCAUCAAAG |
| 2368 | 290 | ACUGGCGCUUUUAUCUGAUUACUUUGAGAGCCAUCACCAGCGACUAUGUCGUAG |
| | | UGGGUAAAGCUGCACUAUGGGCGCAGCACAUGAGGAUAACCCAUGUGCUGACGG |
| | | UACAGGCCACAUGAGGAUAACCCAUGUGGUAUAGUGCAGCAUCAAAG |
| 2369 | 291 | ACUGGCGCUUUUAUCUGAUUACUUUGAGAGCCAUCACCAGCGACUAUGUCGUAG |
| | | UGGGUAAAGCUGCACUAUGGGCGCAGCACAUGAGGAUGACCCAUGUGCUGACGG |
| | | UACAGGCCACAUGAGGAUGACCCAUGUGGUAUAGUGCAGCAUCAAAG |
| 2370 | 292 | ACUGGCGCUUUUAUCUGAUUACUUUGAGAGCCAUCACCAGCGACUAUGUCGUAG |
| | | UGGGUAAAGCUGCACUAUGGGCGCAGCACAUGAGGACCACCCAUGUGCUGACGG |
| | | UACAGGCCACAUGAGGACCACCCAUGUGGUAUAGUGCAGCAUCAAAG |
| 2371 | 293 | ACUGGCGCUUUUAUCUGAUUACUUUGAGAGCCAUCACCAGCGACUAUGUCGUAG |
| | | UGGGUAAAGCUGCACUAUGGGCGCAGCAGAUGAGGAUCACCCAUGGGCUGACGG |
| | | UACAGGCCAGAUGAGGAUCACCCAUGGGGUAUAGUGCAGCAUCAAAG |
| 2372 | 294 | ACUGGCGCUUUUAUCUGAUUACUUUGAGAGCCAUCACCAGCGACUAUGUCGUAG |
| | | UGGGUAAAGCUGCACUAUGGGCGCAGCACAUGGGGAUCACCCAUGUGCUGACGG |
| | | UACAGGCCACAUGGGGAUCACCCAUGUGGUAUAGUGCAGCAUCAAAG |
| 2373 | 295 | ACUGGCGCUUUUAUCUGAUUACUUUGAGAGCCAUCACCAGCGACUAUGUCGUAG |
| | | UGGGUAAAGCUGCACUAUGGGCGCAGCACAUGAGGAUCACCCAUGUGCUGACGG |
| | | UACAGGCCACAUGAGGAUCACCCAUGUGGUAUAGUGCAGCAUCAAAG |
| 2374 | 296 | ACUGGCGCUUUUAUCUGAUUACUUUGAGAGCCAUCACCAGCGACUAUGUCGUAG |
| | | UGGGUAAAGCUCACCUGAGGAUCACCCAGGUGAGCAUCAAAG |
| 2375 | 297 | ACUGGCGCUUUUAUCUGAUUACUUUGAGAGCCAUCACCAGCGACUAUGUCGUAG |
| | | UGGGUAAAGCUCGCAUGAGGAUCACCCAUGCGAGCAUCAAAG |
| 2376 | 298 | ACUGGCGCUUUUAUCUGAUUACUUUGAGAGCCAUCACCAGCGACUAUGUCGUAG |
| | | UGGGUAAAGCUCGCCUGAGGAUCACCCAGGCGAGCAUCAAAG |
| 2377 | 299 | ACUGGCGCUUUUAUCUGAUUACUUUGAGAGCCAUCACCAGCGACUAUGUCGUAG |
| | | UGGGUAAAGCUCGCCUGAGCAUCAGCCAGGCGAGCAUCAAAG |
| 2378 | 300 | ACUGGCGCUUUUAUCUGAUUACUUUGAGAGCCAUCACCAGCGACUAUGUCGUAG |
| | | UGGGUAAAGCUCACAUGAGCAUCAGCCAUGUGAGCAUCAAAG |
| 2379 | 301 | ACUGGCGCUUUUAUCUGAUUACUUUGAGAGCCAUCACCAGCGACUAUGUCGUAG |
| | | UGGGUAAAGCUCACAUGAGUAUCAACCAUGUGAGCAUCAAAG |
| 2380 | 302 | ACUGGCGCUUUUAUCUGAUUACUUUGAGAGCCAUCACCAGCGACUAUGUCGUAG |
| | | UGGGUAAAGCUCACAUGAGAAUCAGCCAUGUGAGCAUCAAAG |
| 2381 | 303 | ACUGGCGCUUUUAUCUGAUUACUUUGAGAGCCAUCACCAGCGACUAUGUCGUAG |
| | | UGGGUAAAGCUCCCUUGAGGAUCACCCAUGUGAGCAUCAAAG |
| 2382 | 304 | ACUGGCGCUUUUAUCUGAUUACUUUGAGAGCCAUCACCAGCGACUAUGUCGUAG |
| | | UGGGUAAAGCUCACUUGAGGAUCACCCAUGUGAGCAUCAAAG |
| 2383 | 305 | ACUGGCGCUUUUAUCUGAUUACUUUGAGAGCCAUCACCAGCGACUAUGUCGUAG |
| | | UGGGUAAAGCUCACCUGAGGAUCACCCAUGUGAGCAUCAAAG |
| 2384 | 306 | ACUGGCGCUUUUAUCUGAUUACUUUGAGAGCCAUCACCAGCGACUAUGUCGUAG |
| | | UGGGUAAAGCUCACAUGAGGAUCACCUAUGUGAGCAUCAAAG |
| 2385 | 307 | ACUGGCGCUUUUAUCUGAUUACUUUGAGAGCCAUCACCAGCGACUAUGUCGUAG |
| | | UGGGUAAAGCUCACAUUAGGAUCACCAAUGUGAGCAUCAAAG |
| 2386 | 308 | ACUGGCGCUUUUAUCUGAUUACUUUGAGAGCCAUCACCAGCGACUAUGUCGUAG |
| | | UGGGUAAAGCUCACAUUAGGAUCACCGAUGUGAGCAUCAAAG |
| 2387 | 309 | ACUGGCGCUUUUAUCUGAUUACUUUGAGAGCCAUCACCAGCGACUAUGUCGUAG |
| | | UGGGUAAAGCUCACAUUAGGAUCACCUAUGUGAGCAUCAAAG |
| 2388 | 310 | ACUGGCGCUUUUAUCUGAUUACUUUGAGAGCCAUCACCAGCGACUAUGUCGUAG |
| | | UGGGUAAAGCUCACAUGAGGAUUACCCAUGUGAGCAUCAAAG |
| 2389 | 311 | ACUGGCGCUUUUAUCUGAUUACUUUGAGAGCCAUCACCAGCGACUAUGUCGUAG |
| | | UGGGUAAAGCUCACAUGAGGAUAACCCAUGUGAGCAUCAAAG |
| 2390 | 312 | ACUGGCGCUUUUAUCUGAUUACUUUGAGAGCCAUCACCAGCGACUAUGUCGUAG |
| | | UGGGUAAAGCUCACAUGAGGAUGACCCAUGUGAGCAUCAAAG |
| 2391 | 313 | ACUGGCGCUUUUAUCUGAUUACUUUGAGAGCCAUCACCAGCGACUAUGUCGUAG |
| | | UGGGUAAAGCUCACAUGAGGACCACCCAUGUGAGCAUCAAAG |
| 2392 | 314 | ACUGGCGCUUUUAUCUGAUUACUUUGAGAGCCAUCACCAGCGACUAUGUCGUAG |
| | | UGGGUAAAGCUCAGAUGAGGAUCACCCAUGGGAGCAUCAAAG |
| 2393 | 315 | ACUGGCGCUUUUAUCUGAUUACUUUGAGAGCCAUCACCAGCGACUAUGUCGUAG |
| | | UGGGUAAAGCUCACAUGGGGAUCACCCAUGUGAGCAUCAAAG |
| 2394 | 317 | ACUGGCGCUUCUAUCUGAUUACUCUGAGCGCCAUCACCAGCGACUAUGUCGUAG |
| | | UGGGUAAAGCUCACAUGAGGAUCACCCAUGUGAGCAUCAGAG |
| 2395 | 318 | ACUGGCGCUUCUAUCUGAUUACUCUGAGCGCCAUCACCAGCGACUAUGUCGUAG |
| | | UGGGUAAAGCUGCACUAUGGGCGCAGCGUCAAUGACGCUGACGGUACAGGCCAC |
| | | AUGAGGAUCACCCAUGUGGUAUAGUGCAGCAUCAGAG |
| 2396 | 319 | ACUGGCGCUUCUAUCUGAUUACUCUGAGCGCCAUCACCAGCGACUAUGUCGUAG |
| | | UGGGUAAAGCUGCACUAUGGGCGCAGCUCAUGAGGAUCACCCAUGAGCUGACGG |
| | | UACAGGCCACAUGAGGAUCACCCAUGUGGUAUAGUGCAGCAUCAGAG |
| 2397 | 320 | ACUGGCGCUUCUAUCUGAUUACUCUGAGCGCCAUCACCAGCGACUAUGUCGUAG |
| | | UGGGUAAAGCUGCACUAUGGGCGCAGACAUGGCAGUCGUAACGACGCGGGUCUG |
| | | ACGGUACAGGCCACAUGAGGAUCACCCAUGUGGUAUAGUGCAGCAUCAGAG |
| 2398 | 321 | ACUGGCGCUUUUAUCUGAUUACUUUGAGAGCCAUCACCAGCGACUAUGUCGUAG |
| | | UGGGUAAAGCUGCACUAUGGGGCCACAUGAGGAUCACCCAUGUGGUGUACAGCG |
| | | CAGCGUCAAUGACGCUGACGAUAGUGCAGCAUCAAAG |

[0167] In some embodiments, a sgRNA variant comprises one or more additional modifications to a sequence of SEQ ID NO:2238, SEQ ID NO:2239, SEQ ID NO:2240, SEQ ID NO:2241, SEQ ID NO:2243, SEQ ID NO:2256, SEQ ID NO:2274, SEQ ID NO:2275, SEQ ID NO:2279, SEQ ID NO:2281, SEQ ID NO: 2285, SEQ ID NO: 2289, SEQ ID NO: 2292, or SEQ ID NO: 2308 of Table 2.

[0168] In some embodiments of the gRNA variants of the disclosure, the gRNA variant comprises at least one modification compared to the reference guide scaffold of SEQ ID NO:5, wherein the at least one modification is selected from one or more of: (a) a C18G substitution in the triplex loop; (b) a G55 insertion in the stem bubble; (c) a U1 deletion; (d) a modification of the extended stem loop wherein (i) a 6 nt loop and 13 loop-proximal base pairs are replaced by a Uvsx hairpin; and (ii) a deletion of A99 and a substitution of G65U that results in a loop-distal base that is fully base-paired.

[0169] In some embodiments, a gRNA variant comprises an exogenous stem loop having a long non-coding RNA (lncRNA). As used herein, a lncRNA refers to a non-coding RNA that is longer than approximately 200 bp in length. In some embodiments, the 5′ and 3′ ends of the exogenous stem loop are base paired; i.e., interact to form a region of duplex RNA. In some embodiments, the 5′ and 3′ ends of the exogenous stem loop are base paired, and one or more regions between the 5′ and 3′ ends of the exogenous stem loop are not base paired, forming the loop.

[0170] In some embodiments, the disclosure provide gRNA variants with nucleotide modifications relative to reference gRNA having: (a) substitution of 1 to 15 consecutive or non-consecutive nucleotides in the gRNA variant in one or more regions; (b) a deletion of 1 to 10 consecutive or non-consecutive nucleotides in the gRNA variant in one or more regions; (c) an insertion of 1 to 10 consecutive or non-consecutive nucleotides in the gRNA variant in one or more regions; (d) a substitution of the scaffold stem loop or the extended stem loop with an RNA stem loop sequence from a heterologous RNA source with proximal 5′ and 3′ ends; or any combination of (a)-(d). Any of the substitutions, insertions and deletions described herein can be combined to generate a gRNA variant of the disclosure. For example, a gRNA variant can comprise at least one substitution and at least one deletion relative to a reference gRNA, at least one substitution and at least one insertion relative to a reference gRNA, at least one insertion and at least one deletion relative to a reference gRNA, or at least one substitution, one insertion and one deletion relative to a reference gRNA.

[0171] In some embodiments, a sgRNA variant of the disclosure comprises one or more modifications to the sequence of a previously generated variant, the previously generated variant itself serving as the sequence to be modified. In some cases, one or modifications are introduced to the pseudoknot region of the scaffold. In other cases, one or modifications are introduced to the triplex region of the scaffold. In other cases, one or modifications are introduced to the scaffold bubble. In other cases, one or modifications are introduced to the extended stem region of the scaffold. In still other cases, one of modifications are introduced into two or more of the foregoing regions. Such modifications can comprise an insertion, deletion, or substitution of one or more nucleotides in the foregoing regions, or any combination thereof. Exemplary methods to generate and assess the modifications are described in Example 15.

[0172] In some embodiments, a sgRNA variant comprises one or more modifications to a sequence of SEQ ID NO: 2238, SEQ ID NO: 2239, SEQ ID NO: 2240, SEQ ID NO: 2241, SEQ ID NO:2241, SEQ ID NO:2274, SEQ ID NO:2275, SEQ ID NO: 2279, or SEQ ID NO: 2285, SEQ ID NO: 2289, SEQ ID NO: 2292, or SEQ ID NO: 2308.

[0173] In exemplary embodiments, a gRNA variant comprises one or more modifications relative to gRNA scaffold variant 174 (SEQ ID NO:2238), wherein the resulting gRNA variant exhibits a improved functional characteristic compared to the parent 174, when assessed in an in vitro or in vivo assay under comparable conditions. In other exemplary embodiments, a gRNA variant comprises one or more modifications relative to gRNA scaffold variant 175 (SEQ ID NO:2239), wherein the resulting gRNA variant exhibits a improved functional characteristic compared to the parent 175, when assessed in an in vitro or in vivo assay under comparable conditions. For example, variants with modifications to the triplex loop of gRNA variant 175 show high enrichment relative to the 175 scaffold, particularly mutations to C15 or C17. Additionally, changes to either member of the predicted pair in the pseudoknot stem between G7 and A29 are both highly enriched relative to the 175 scaffold, with converting A29 to a C or a T to form a canonical Watson-Crick pairing (G7:C29), and the second of which would form a GU wobble pair (G7:U29), both of which may be expected to increase stability of the helix relative to the G:A pair. In addition, the insertion of a C at position 54 in guide scaffold 175 results in an enriched modification.

[0174] In some embodiments, the disclosure provides gRNA variants comprising one or more modifications to the gRNA scaffold variant 174 (SEQ ID NO: 2238) selected from the group consisting of the modifications of Table 19, wherein the resulting gRNA variant exhibits an improved functional characteristic compared to the parent 174, when assessed in an in vitro or in vivo assay under comparable conditions. In some embodiments, the improved functional characteristic is one or more functional properties selected from the group consisting of increased editing activity, increased pseudoknot stem stability, increased triplex region stability, increased scaffold stem stability, extended stem stability, reduced off-target folding intermediates, and increased binding affinity to a Class 2, Type V CRISPR protein. In the foregoing embodiments, the gRNA comprising one or more modifications to the gRNA scaffold variant 174 selected from the group consisting of the modifications of Table 16 (with a linked targeting sequence and complexed with a Class 2, Type V CRISPR protein) exhibits an improved enrichment score (log 2) of at least about 2.0, at least about 2.5, at least about 3, or at least about 3.5 greater compared to the score of the gRNA scaffold of SEQ ID NO: 2238 in an in vitro assay.

[0175] In some embodiments, the disclosure provides gRNA variants comprising one or more modifications to the gRNA scaffold variant 175 (SEQ ID NO: 2239) selected from the group consisting of the modifications of Table 20, wherein the resulting gRNA variant exhibits an improved functional characteristic compared to the parent 175, when assessed in an in vitro or in vivo assay under comparable conditions. In some embodiments, the improved functional characteristic is one or more functional properties selected from the group consisting of increased editing activity, increased pseudoknot stem stability, increased triplex region stability, increased scaffold stem stability, extended stem stability, reduced off-target folding intermediates, and increased binding affinity to a Class 2, Type V CRISPR protein. In the foregoing embodiments, the gRNA comprising one or more modifications to the gRNA scaffold variant 175 selected from the group consisting of the modifications of Table 16 (with a linked targeting sequence and complexed with a Class 2, Type V CRISPR protein) exhibits an improved enrichment score (log 2) of at least about 1.2, at least about 1.5, at least about 2.0, at least about 2.5, at least about 3, or at least about 3.5 greater compared to the score of the gRNA scaffold of SEQ ID NO: 2239 in an in vitro assay.

[0176] In a particular embodiment, the one or more modifications of gRNA scaffold variant 174 are selected from the group consisting of nucleotide positions U11, U24, A29, U65, C66, C68, A69, U76, G77, A79, and A87. In a particular embodiment, the modifications of gRNA scaffold variant 174 are U11C, U24C, A29C, U65C, C66G, C68U, an insertion of ACGGA at position 69, an insertion of UCCGU at position 76, G77A, an insertion of GA at position 79, A87G. In another particular embodiment, the modifications of gRNA scaffold variant 175 are selected from the group consisting of nucleotide positions C9, U11, C17, U24, A29, G54, C65, A89, and A96. In a particular embodiment, the modifications of gRNA scaffold variant 174 are C9U, U11C, C17G, U24C, A29C, an insertion of G at position 54, an insertion of C at position 65, A89G, and A96G.

[0177] In exemplary embodiments, a gRNA variant comprises one or more modifications relative to gRNA scaffold variant 215 (SEQ ID NO:2275), wherein the resulting gRNA variant exhibits an improved functional characteristic compared to the parent 215, when assessed in an in vitro or in vivo assay under comparable conditions.

[0178] In exemplary embodiments, a gRNA variant comprises one or more modifications relative to gRNA scaffold variant 221 (SEQ ID NO: 2281), wherein the resulting gRNA variant exhibits an improved functional characteristic compared to the parent 221, when assessed in an in vitro or in vivo assay under comparable conditions.

[0179] In exemplary embodiments, a gRNA variant comprises one or more modifications relative to gRNA scaffold variant 225 (SEQ ID NO: 2285), wherein the resulting gRNA variant exhibits an improved functional characteristic compared to the parent 225, when assessed in an in vitro or in vivo assay under comparable conditions.

[0180] In exemplary embodiments, a gRNA variant comprises one or more modifications relative to gRNA scaffold variant 235 (SEQ ID NO: 2292), wherein the resulting gRNA variant exhibits an improved functional characteristic compared to the parent 225, when assessed in an in vitro or in vivo assay under comparable conditions.

[0181] In exemplary embodiments, a gRNA variant comprises one or more modifications relative to gRNA scaffold variant 251 (SEQ ID NO: 2308), wherein the resulting gRNA variant exhibits an improved functional characteristic compared to the parent 251, when assessed in an in vitro or in vivo assay under comparable conditions.

[0182] In the foregoing embodiments, the improved functional characteristic includes, but is not limited to one or more of increased stability, increased transcription of the gRNA, increased resistance to nuclease activity, increased folding rate of the gRNA, decreased side product formation during folding, increased productive folding, increased binding affinity to a CasX protein, increased binding affinity to a target nucleic acid when complexed with the CasX protein, increased gene editing when complexed with the CasX protein, increased specificity of editing when complexed with the CasX protein, decreased off-target editing when complexed with the CasX protein, and increased ability to utilize a greater spectrum of one or more PAM sequences, including ATC, CTC, GTC, or TTC, in the modifying of target nucleic acid when complexed with the CasX protein. In some cases, the one or more of the improved characteristics of the gRNA variant is at least about 1.1 to about 100,000-fold improved relative to the gRNA from which it was derived. In other cases, the one or more improved characteristics of the gRNA variant is at least about 1.1, at least about 10, at least about 100, at least about 1000, at least about 10,000, at least about 100,000-fold or more improved relative to the gRNA from which it was derived. In other cases, the one or more of the improved characteristics of the gRNA variant is about 1.1 to 100,00-fold, about 1.1 to 10,00-fold, about 1.1 to 1,000-fold, about 1.1 to 500-fold, about 1.1 to 100-fold, about 1.1 to 50-fold, about 1.1 to 20-fold, about 10 to 100,00-fold, about 10 to 10,00-fold, about 10 to 1,000-fold, about 10 to 500-fold, about 10 to 100-fold, about 10 to 50-fold, about 10 to 20-fold, about 2 to 70-fold, about 2 to 50-fold, about 2 to 30-fold, about 2 to 20-fold, about 2 to 10-fold, about 5 to 50-fold, about 5 to 30-fold, about 5 to 10-fold, about 100 to 100,00-fold, about 100 to 10,00-fold, about 100 to 1,000-fold, about 100 to 500-fold, about 500 to 100,00-fold, about 500 to 10,00-fold, about 500 to 1,000-fold, about 500 to 750-fold, about 1,000 to 100,00-fold, about 10,000 to 100,00-fold, about 20 to 500-fold, about 20 to 250-fold, about 20 to 200-fold, about 20 to 100-fold, about 20 to 50-fold, about 50 to 10,000-fold, about 50 to 1,000-fold, about 50 to 500-fold, about 50 to 200-fold, or about 50 to 100-fold, improved relative to the gRNA from which it was derived. In other cases, the one or more improved characteristics of the gRNA variant is about 1.1-fold, 1.2-fold, 1.3-fold, 1.4-fold, 1.5-fold, 1.6-fold, 1.7-fold, 1.8-fold, 1.9-fold, 2-fold, 3-fold, 4-fold, 5-fold, 6-fold, 7-fold, 8-fold, 9-fold, 10-fold, 11-fold, 12-fold, 13-fold, 14-fold, 15-fold, 16-fold, 17-fold, 18-fold, 19-fold, 20-fold, 25-fold, 30-fold, 40-fold, 45-fold, 50-fold, 55-fold, 60-fold, 70-fold, 80-fold, 90-fold, 100-fold, 110-fold, 120-fold, 130-fold, 140-fold, 150-fold, 160-fold, 170-fold, 180-fold, 190-fold, 200-fold, 210-fold, 220-fold, 230-fold, 240-fold, 250-fold, 260-fold, 270-fold, 280-fold, 290-fold, 300-fold, 310-fold, 320-fold, 330-fold, 340-fold, 350-fold, 360-fold, 370-fold, 380-fold, 390-fold, 400-fold, 425-fold, 450-fold, 475-fold, or 500-fold improved relative to the gRNA from which it was derived.

[0183] In some embodiments, the gRNA variant comprises an exogenous extended stem loop, with such differences from a reference gRNA described as follows. In some embodiments, an exogenous extended stem loop has little or no identity to the reference stem loop regions disclosed herein (e.g., SEQ ID NO:15). In some embodiments, an exogenous stem loop is at least 10 bp, at least 20 bp, at least 30 bp, at least 40 bp, at least 50 bp, at least 60 bp, at least 70 bp, at least 80 bp, at least 90 bp, at least 100 bp, at least 200 bp, at least 300 bp, at least 400 bp, at least 500 bp, at least 600 bp, at least 700 bp, at least 800 bp, at least 900 bp, at least 1,000 bp, at least 2,000 bp, at least 3,000 bp, at least 4,000 bp, at least 5,000 bp, at least 6,000 bp, at least 7,000 bp, at least 8,000 bp, at least 9,000 bp, at least 10,000 bp, at least 12,000 bp, at least 15,000 bp or at least 20,000 bp. In some embodiments, the gRNA variant comprises an extended stem loop region comprising at least 10, at least 100, at least 500, at least 1000, or at least 10,000 nucleotides. In some embodiments, the heterologous stem loop increases the stability of the gRNA. In some embodiments, the heterologous RNA stem loop is capable of binding a protein, an RNA structure, a DNA sequence, or a small molecule. In some embodiments, an exogenous stem loop region replacing the stem loop comprises an RNA stem loop or hairpin in which the resulting gRNA has increased stability and, depending on the choice of loop, can interact with certain cellular proteins or RNA. Such exogenous extended stem loops can comprise, for example a thermostable RNA such as MS2 hairpin (ACAUGAGGAUCACCCAUGU (SEQ ID NO: 1137)), QP hairpin (UGCAUGUCUAAGACAGCA (SEQ ID NO: 32)), U1 hairpin II (AAUCCAUUGCACUCCGGAUU (SEQ ID NO: 33)), Uvsx (CCUCUUCGGAGG (SEQ ID NO: 34)), PP7 hairpin (AGGAGUUUCUAUGGAAACCCU (SEQ ID NO: 35)), Phage replication loop (AGGUGGGACGACCUCUCGGUCGUCCUAUCU (SEQ ID NO: 36)), Kissing loop_a (UGCUCGCUCCGUUCGAGCA (SEQ ID NO: 37)), Kissing loop_bl (UGCUCGACGCGUCCUCGAGCA (SEQ ID NO: 38)), Kissing loop_b2 (UGCUCGUUUGCGGCUACGAGCA (SEQ ID NO: 39)), G quadriplex M3q (AGGGAGGGAGGGAGAGG (SEQ ID NO: 40)), G quadriplex telomere basket (GGUUAGGGUUAGGGUUAGG (SEQ ID NO: 41)), Sarcin-ricin loop (CUGCUCAGUACGAGAGGAACCGCAG (SEQ ID NO: 42)) or Pseudoknots (UACACUGGGAUCGCUGAAUUAGAGAUCGGCGUCCUUUCAUUCUAUAUACUUUGG AGUUUUAAAAUGUCUCUAAGUACA (SEQ ID NO: 43)). In some embodiments, one of the foregoing hairpin sequences is incorporated into the stem loop to help traffic the incorporation of the gRNA (and an associated CasX in an RNP complex) into a budding XDP (described more fully, below) when the counterpart ligand is incorporated into the Gag polyprotein of the XDP.

[0184] In some embodiments, a gRNA variant comprises a terminal fusion partner. The term gRNA variant is inclusive of variants that include exogenous sequences such as terminal fusions, or internal insertions. Exemplary terminal fusions may include fusion of the gRNA to a self-cleaving ribozyme or protein binding motif. As used herein, a “ribozyme” refers to an RNA or segment thereof with one or more catalytic activities similar to a protein enzyme. Exemplary ribozyme catalytic activities may include, for example, cleavage and/or ligation of RNA, cleavage and/or ligation of DNA, or peptide bond formation. In some embodiments, such fusions could either improve scaffold folding or recruit DNA repair machinery. For example, a gRNA may in some embodiments be fused to a hepatitis delta virus (HDV) antigenomic ribozyme, HDV genomic ribozyme, hatchet ribozyme (from metagenomic data), env25 pistol ribozyme (representative from Aliistipes putredinis), HH15 Minimal Hammerhead ribozyme, tobacco ringspot virus (TRSV) ribozyme, WT viral Hammerhead ribozyme (and rational variants), or Twisted Sister 1 or RBMX recruiting motif. Hammerhead ribozymes are RNA motifs that catalyze reversible cleavage and ligation reactions at a specific site within an RNA molecule. Hammerhead ribozymes include type I, type II and type III hammerhead ribozymes. The HDV, pistol, and hatchet ribozymes have self-cleaving activities. gRNA variants comprising one or more ribozymes may allow for expanded gRNA function as compared to a gRNA reference. For example, gRNAs comprising self-cleaving ribozymes can, in some embodiments, be transcribed and processed into mature gRNAs as part of polycistronic transcripts. Such fusions may occur at either the 5′ or the 3′ end of the gRNA. In some embodiments, a gRNA variant comprises a fusion at both the 5′ and the 3′ end, wherein each fusion is independently as described herein.

[0185] In the embodiments of the gRNA variants, the gRNA variant further comprises a spacer (or targeting sequence) region located at the 3′ end of the gRNA, capable of hybridizing with a target nucleic acid which comprises at least 14 to about 35 nucleotides wherein the spacer is designed with a sequence that is complementary to a target nucleic acid. In some embodiments, the encoded gRNA variant comprises a targeting sequence of at least 10 to 20 nucleotides complementary to a target nucleic acid. In some embodiments, the targeting sequence has 14, 15, 16, 17, 18, 19, 20, 21, 22, 23, 24, 25, 26, 27, 28, 29, or 30 nucleotides. In some embodiments, the encoded gRNA variant comprises a targeting sequence having 20 nucleotides. In some embodiments, the targeting sequence has 25 nucleotides. In some embodiments, the targeting sequence has 24 nucleotides. In some embodiments, the targeting sequence has 23 nucleotides. In some embodiments, the targeting sequence has 22 nucleotides. In some embodiments, the targeting sequence has 21 nucleotides. In some embodiments, the targeting sequence has 20 nucleotides. In some embodiments, the targeting sequence has 19 nucleotides. In some embodiments, the targeting sequence has 18 nucleotides. In some embodiments, the targeting sequence has 17 nucleotides. In some embodiments, the targeting sequence has 16 nucleotides. In some embodiments, the targeting sequence has 15 nucleotides. In some embodiments, the targeting sequence has 14 nucleotides.

h. Complex Formation with Class 2, Type V Protein

[0186] In some embodiments, upon expression, the gRNA variant is complexed as an RNP with a Class 2, Type V protein, including CasX variant proteins comprising any one of the sequences SEQ ID NOS: 247-592 or 1147-1231 of Table 3, or a sequence having at least about 50%, at least about 60%, at least about 70%, at least about 80%, at least about 85%, at least about 90%, at least about 91%, at least about 92%, at least about 93%, at least about 94%, at least about 95%, at least about 96%, at least about 97%, at least about 98%, or at least about 99% identity thereto. In some embodiments, upon expression, the gRNA variant is complexed as an RNP with a CasX variant protein comprising any one of the sequences SEQ ID NOS: 270-592 or 1147-1231, or a sequence having at least about 50%, at least about 60%, at least about 70%, at least about 80%, at least about 85%, at least about 90%, at least about 91%, at least about 92%, at least about 93%, at least about 94%, at least about 95%, at least about 96%, at least about 97%, at least about 98%, or at least about 99% identity thereto. In some embodiments, upon expression, the gRNA variant is complexed as an RNP with a CasX variant protein comprising any one of the sequences SEQ ID NOS: 415-592 or1147-1231, or a sequence having at least about 50%, at least about 60%, at least about 70%, at least about 80%, at least about 85%, at least about 90%, at least about 91%, at least about 92%, at least about 93%, at least about 94%, at least about 95%, at least about 96%, at least about 97%, at least about 98%, or at least about 99% identity thereto.

[0187] In some embodiments, a gRNA variant has an improved ability to form a complex with a CasX variant protein when compared to a reference gRNA, thereby improving its ability to form a cleavage-competent ribonucleoprotein (RNP) complex with the CasX protein, as described in the Examples. Improving ribonucleoprotein complex formation may, in some embodiments, improve the efficiency with which functional RNPs are assembled. In some embodiments, greater than 90%, greater than 93%, greater than 95%, greater than 96%, greater than 97%, greater than 98% or greater than 99% of RNPs comprising a gRNA variant and its targeting sequence are competent for gene editing of a target nucleic acid.

[0188] Exemplary nucleotide changes that can improve the ability of gRNA variants to form a complex with CasX protein may, in some embodiments, include replacing the scaffold stem with a thermostable stem loop. Without wishing to be bound by any theory, replacing the scaffold stem with a thermostable stem loop could increase the overall binding stability of the gRNA variant with the CasX protein. Alternatively, or in addition, removing a large section of the stem loop could change the gRNA variant folding kinetics and make a functional folded gRNA easier and quicker to structurally-assemble, for example by lessening the degree to which the gRNA variant can get “tangled” in itself. In some embodiments, choice of scaffold stem loop sequence can be varied with different targeting sequences that are utilized for the gRNA. In some embodiments, scaffold sequence can be tailored to the targeting sequence and therefore the target sequence. Biochemical assays can be used to evaluate the binding affinity of CasX protein for the gRNA variant to form the RNP, including the assays of the Examples. For example, a person of ordinary skill can measure changes in the amount of a fluorescently tagged gRNA that is bound to an immobilized CasX protein, as a response to increasing concentrations of an additional unlabeled “cold competitor” gRNA. Alternatively, or in addition, fluorescence signal can be monitored to or see how it changes as different amounts of fluorescently labeled gRNA are flowed over immobilized CasX protein. Alternatively, the ability to form an RNP can be assessed using in vitro cleavage assays against a defined target nucleic acid sequence, as described in the Examples.

i. Chemically Modified gRNAs

[0189] In some embodiments, the disclosure provides chemically-modified gRNAs. In some embodiments, the present disclosure provides a chemically-modified gRNA that has guide NA functionality and has reduced susceptibility to cleavage by a nuclease. A gRNA that comprises any nucleotide other than the four canonical ribonucleotides A, C, G, and U, or a deoxynucleotide, is a chemically modified gRNA. In some cases, a chemically-modified gRNA comprises any backbone or internucleotide linkage other than a natural phosphodiester internucleotide linkage. In certain embodiments, the retained functionality includes the ability of the modified gRNA to bind to a CasX of any of the embodiments described herein. In certain embodiments, the retained functionality includes the ability of the modified gRNA to bind to a target nucleic acid sequence. In certain embodiments, the retained functionality includes targeting a CasX protein or the ability of a pre-complexed RNP to bind to a target nucleic acid sequence. In certain embodiments, the retained functionality includes the ability to nick a target polynucleotide by a CasX-gRNA. In certain embodiments, the retained functionality includes the ability to cleave a target nucleic acid sequence by a CasX-gRNA. In certain embodiments, the retained functionality is any other known function of a gRNA in a recombinant system with a CasX chimera protein of the embodiments of the disclosure.

[0190] In some embodiments, the disclosure provides a chemically-modified gRNA in which a nucleotide sugar modification is incorporated into the gRNA selected from the group consisting of 2′-O—C₁₋₄alkyl such as 2′-O-methyl (2′-OMe), 2′-deoxy (2′-H), 2′-O—C₁₋₃alkyl-O—C₃alkyl such as 2′-methoxyethyl (“2′-MOE”), 2′-fluoro (“2′-F”), 2′-amino (“2′-NH₂”), 2′-arabinosyl (“2′-arabino”) nucleotide, 2′-F-arabinosyl (“2′-F-arabino”) nucleotide, 2′-locked nucleic acid (“LNA”) nucleotide, 2′-unlocked nucleic acid (“ULNA”) nucleotide, a sugar in L form (“L-sugar”), and 4′-thioribosyl nucleotide. In other embodiments, an internucleotide linkage modification incorporated into the guide RNA is selected from the group consisting of: phosphorothioate “P(S)” (P(S)), phosphonocarboxylate (P(CH₂)ₙCOOR) such as phosphonoacetate “PACE” (P(CH₂COO—)), thiophosphonocarboxylate ((S)P(CH₂)ₙCOOR) such as thiophosphonoacetate “thioPACE” ((S)P(CH₂)ₙCOO—)), alkylphosphonate (P(C₃alkyl) such as methylphosphonate —P(CH₃), boranophosphonate (P(BH₃)), and phosphorodithioate (P(S)₂).

[0191] In certain embodiments, the disclosure provides a chemically-modified gRNA in which a nucleobase (“base”) modification is incorporated into the gRNA selected from the group consisting of: 2-thiouracil (“2-thioU”), 2-thiocytosine (“2-thioC”), 4-thiouracil (“4-thioU”), 6-thioguanine (“6-thioG”), 2-aminoadenine (“2-aminoA”), 2-aminopurine, pseudouracil, hypoxanthine, 7-deazaguanine, 7-deaza-8-azaguanine, 7-deazaadenine, 7-deaza-8-azaadenine, 5-methylcytosine (“5-methylC”), 5-methyluracil (“5-methylU”), 5-hydroxymethylcytosine, 5-hydroxymethyluracil, 5,6-dehydrouracil, 5-propynylcytosine, 5-propynyluracil, 5-ethynylcytosine, 5-ethynyluracil, 5-allyluracil (“5-allylU”), 5-allylcytosine (“5-allylC”), 5-aminoallyluracil (“5-aminoallylU”), 5-aminoallyl-cytosine (“5-aminoallylC”), an abasic nucleotide, Z base, P base, Unstructured Nucleic Acid (“UNA”), isoguanine (“isoG”), isocytosine (“isoC”), 5-methyl-2-pyrimidine, x(A,G,C,T) and y(A,G,C,T).

[0192] In other embodiments, the disclosure provides a chemically-modified gRNA in which one or more isotopic modifications are introduced on the nucleotide sugar, the nucleobase, the phosphodiester linkage and/or the nucleotide phosphates, including nucleotides comprising one or more ¹⁵N, ¹³C, ¹⁴C, deuterium, ³H, ³²p, ¹²⁵ I, ¹³¹I atoms or other atoms or elements used as tracers.

[0193] In some embodiments, an “end” modification incorporated into the gRNA is selected from the group consisting of: PEG (polyethyleneglycol), hydrocarbon linkers (including: heteroatom (O,S,N)-substituted hydrocarbon spacers; halo-substituted hydrocarbon spacers; keto-, carboxyl-, amido-, thionyl-, carbamoyl-, thionocarbamaoyl-containing hydrocarbon spacers), spermine linkers, dyes including fluorescent dyes (for example fluoresceins, rhodamines, cyanines) attached to linkers such as, for example 6-fluorescein-hexyl, quenchers (for example dabcyl, BHQ) and other labels (for example biotin, digoxigenin, acridine, streptavidin, avidin, peptides and/or proteins). In some embodiments, an “end” modification comprises a conjugation (or ligation) of the gRNA to another molecule comprising an oligonucleotide of deoxynucleotides and/or ribonucleotides, a peptide, a protein, a sugar, an oligosaccharide, a steroid, a lipid, a folic acid, a vitamin and/or other molecule. In certain embodiments, the disclosure provides a chemically-modified gRNA in which an “end” modification (described above) is located internally in the gRNA sequence via a linker such as, for example, a 2-(4-butylamidofluorescein)propane-1,3-diol bis(phosphodiester) linker, which is incorporated as a phosphodiester linkage and can be incorporated anywhere between two nucleotides in the gRNA.

[0194] In some embodiments, the disclosure provides a chemically-modified gRNA having an end modification comprising a terminal functional group such as an amine, a thiol (or sulfhydryl), a hydroxyl, a carboxyl, carbonyl, thionyl, thiocarbonyl, a carbamoyl, a thiocarbamoyl, a phoshoryl, an alkene, an alkyne, an halogen or a functional group-terminated linker that can be subsequently conjugated to a desired moiety selected from the group consisting of a fluorescent dye, a non-fluorescent label, a tag (for ¹⁴C, example biotin, avidin, streptavidin, or moiety containing an isotopic label such as ¹⁵N, ¹³C, deuterium, ³H, ³²P, ¹²⁵I and the like), an oligonucleotide (comprising deoxynucleotides and/or ribonucleotides, including an aptamer), an amino acid, a peptide, a protein, a sugar, an oligosaccharide, a steroid, a lipid, a folic acid, and a vitamin. The conjugation employs standard chemistry well-known in the art, including but not limited to coupling via N-hydroxysuccinimide, isothiocyanate, DCC (or DCI), and/or any other standard method as described in “Bioconjugate Techniques” by Greg T. Hermanson, Publisher Eslsevier Science, 3-ded. (2013), the contents of which are incorporated herein by reference in its entirety.

### IV. Class 2, Type V CRISPR Proteins for Modifying a Target Nucleic Acid

[0195] The present disclosure provides systems comprising a CRISPR nuclease that have utility in genome editing of eukaryotic cells. In some embodiments, the CRISPR nuclease employed in the genome editing systems is a Class 2, Type V nuclease. Although members of Class 2, Type V CRISPR-Cas systems have differences, they share some common characteristics that distinguish them from the Cas9 systems. Firstly, the Class 2, Type V nucleases possess a single RNA-guided RuvC domain-containing effector but no HNH domain, and they recognize TC motif PAM 5′ upstream to the target region on the non-targeted strand, which is different from Cas9 systems which rely on G-rich PAM at 3′ side of target sequences. Type V nucleases generate staggered double-stranded breaks distal to the PAM sequence, unlike Cas9, which generates a blunt end in the proximal site close to the PAM. In addition, Type V nucleases degrade ssDNA in trans when activated by target dsDNA or ssDNA binding in cis. In some embodiments, the Type V nucleases of the embodiments recognize a 5′-TC PAM motif and produce staggered ends cleaved solely by the RuvC domain. In some embodiments, the Type V nuclease is selected from the group consisting of Cas12a, Cas12b, Cas12c, Cas12d (CasY), Cas12j, Cas12k, C2c4, C2c8, C2c5, C2c10, C2c9, CasZ and CasX. In some embodiments, the present disclosure provides systems comprising a CasX variant protein and one or more gRNA variants (CasX:gRNA system) that are specifically designed to modify a target nucleic acid sequence in eukaryotic cells.

[0196] The term “CasX protein”, as used herein, refers to a family of proteins, and encompasses all naturally occurring CasX proteins, proteins that share at least 50% identity to naturally occurring CasX proteins, as well as CasX variants possessing one or more improved characteristics relative to a naturally-occurring reference CasX protein or to another CasX variant from which it was derived.

[0197] CasX proteins of the disclosure comprise at least one of the following domains: a non-target strand binding (NTSB) domain, a target strand loading (TSL) domain, a helical I domain (which is further divided into helical I-I and I-II subdomains), a helical II domain, an oligonucleotide binding domain (OBD, which is further divided into OBD-I and OBD-II subdomains), and a RuvC DNA cleavage domain (which is further divided into RuvC-I and II subdomains). The RuvC domain may be modified or deleted in a catalytically-dead CasX variant, described more fully, below.

[0198] In some embodiments, a CasX protein can bind and/or modify (e.g., nick, catalyze a double-strand break, methylate, demethylate, etc.) a target nucleic acid at a specific sequence targeted by an associated gRNA, which hybridizes to a sequence within the target nucleic acid sequence.

a. Reference CasX Proteins

[0199] The disclosure provides naturally-occurring CasX proteins (referred to herein as a “reference CasX protein”), which were subsequently modified to create the CasX variants of the disclosure. For example, reference CasX proteins can be isolated from naturally occurring prokaryotes, such as Deltaproteobacteria, Planctomycetes, or Candidatus Sungbacteria species. A reference CasX protein is a type II CRISPR/Cas endonuclease belonging to the CasX (interchangeably referred to as Cas12e) family of proteins that interacts with a guide RNA to form a ribonucleoprotein (RNP) complex.

[0200] In some cases, a reference CasX protein is isolated or derived from Deltaproteobacter having a sequence of:

| (SEQ ID NO: 1) | | | | | | |
|---|---|---|---|---|---|---|
| 1 | MEKRINKIRK | KLSADNATKP | VSRSGPMKTL | LVRVMTDDLK | KRLEKRRKKP | EVMPQVISNN |
| 61 | AANNLRMLLD | DYTKMKEAIL | QVYWQEFKDD | HVGLMCKFAQ | PASKKIDQNK | LKPEMDEKGN |
| 121 | LTTAGFACSQ | CGQPLFVYKL | EQVSEKGKAY | TNYFGRCNVA | EHEKLILLAQ | LKPEKDSDEA |
| 181 | VTYSLGKFGQ | RALDFYSIHV | TKESTHPVKP | LAQIAGNRYA | SGPVGKALSD | ACMGTIASFL |
| 241 | SKYQDIIIEH | QKVVKGNOKR | LESLRELAGK | ENLEYPSVTL | PPQPHTKEGV | DAYNEVIARV |
| 301 | RMWVNLNLWQ | KLKLSRDDAK | PLLRLKGFPS | FPVVERRENE | VDWWNTINEV | KKLIDAKRDM |
| 361 | GRVFWSGVTA | EKRNTILEGY | NYLPNENDHK | KREGSLENPK | KPAKRQFGDL | LLYLEKKYAG |
| 421 | DWGKVFDEAW | ERIDKKIAGL | TSHIEREEAR | NAEDAQSKAV | LTDWLRAKAS | FVLERLKEMD |
| 481 | EKEFYACEIQ | LQKWYGDLRG | NPFAVEAENR | VVDISGFSIG | SDGHSIQYRN | LLAWKYLENG |
| 541 | KREFYLLMNY | GKKGRIRFTD | GTDIKKSGKW | QGLLYGGGKA | KVIDLTFDPD | DEQLIILPLA |
| 601 | FGTRQGREFI | WNDLLSLETG | LIKLANGRVI | EKTIYNKKIG | RDEPALFVAL | TFERREVVDP |
| 661 | SNIKPVNLIG | VDRGENIPAV | IALTDPEGCP | LPEFKDSSGG | PTDILRIGEG | YKEKORAIQA |
| 721 | AKEVEQRRAG | GYSRKFASKS | RNLADDMVRN | SARDLFYHAV | THDAVLVFEN | LSRGFGROGK |
| 781 | RTFMTERQYT | KMEDWLTAKL | AYEGLTSKTY | LSKTLAQYTS | KTCSNCGFTI | TTADYDGMLV |
| 841 | RLKKTSDGWA | TTLNNKELKA | EGQITYYNRY | KRQTVEKELS | AELDRLSEES | GNNDISKWTK |
| 901 | GRRDEALFLL | KKRFSHRPVQ | EQFVCLDCGH | EVHADEQAAL | NIARSWLFLN | SNSTEFKSYK |
| 961 | SGKQPFVGAW | QAFYKRRLKE | VWKPNA. | | | |

[0201] In some cases, a reference CasX protein is isolated or derived from Planctomycetes having a sequence of:

| (SEQ ID NO: 2) | | | | | | |
|---|---|---|---|---|---|---|
| 1 | MQEIKRINKI | RRRLVKDSNT | KKAGKTGPMK | TLLVRVMTPD | LRERLENLRK | KPENIPQPIS |
| 61 | NTSRANLNKL | LTDYTEMKKA | ILHVYWEEFQ | KDPVGLMSRV | AQPAPKNIDQ | RKLIPVKDGN |
| 121 | ERLTSSGFAC | SQCCQPLYVY | KLEQVNDKGK | PHTNYFGRCN | VSEHERLILL | SPHKPEANDE |
| 181 | LVTYSLGKFG | QRALDFYSIH | VTRESNHPVK | PLEQIGGNSC | ASGPVGKALS | DACMGAVASF |
| 241 | LTKYQDIILE | HQKVIKKNEK | RLANLKDIAS | ANGLAFPKIT | LPPQPHTKEG | IEAYNNVVAQ |
| 301 | IVIWVNLNLW | QKLKIGRDEA | KPLQRLKGFP | SFPLVERQAN | EVDWWDMVCN | VKKLINEKKE |
| 361 | DGKVFWQNLA | GYKRQEALLP | YLSSEEDRKK | GKKFARYQFG | DLLLHLEKKH | GEDWGKVYDE |
| 421 | AWERIDKKVE | GLSKHIKLEE | ERRSEDAQSK | AALTDWLRAK | ASFVIEGLKE | ADKDEFCRCE |
| 481 | LKLOKWYGDL | RGKPFAIEAE | NSILDISGFS | KQYNCAFIWQ | KDGVKKLNLY | LIINYFKGGK |
| 541 | LRFKKIKPEA | FEANRFYTVI | NKKSGEIVPM | EVNENFDDPN | LIILPLAFGK | ROGREFIWND |
| 601 | LLSLETGSLK | LANGRVIEKT | LYNRRTRQDE | PALFVALTFE | RREVLDSSNI | KPMNLIGIDR |
| 661 | GENIPAVIAL | TDPEGCPLSR | FKDSLGNPTH | ILRIGESYKE | KORTIQAAKE | VEQRRAGGYS |
| 721 | RKYASKAKNL | ADDMVRNTAR | DLLYYAVTQD | AMLIFENLSR | GFGRQGKRTF | MAERQYTRME |
| 781 | DWLTAKLAYE | GLPSKTYLSK | TLAQYTSKTC | SNCGFTITSA | DYDRVLEKLK | KTATGWMTTI |
| 841 | NGKELKVEGQ | ITYYNRYKRQ | NVVKDLSVEL | DRLSEESVNN | DISSWTKGRS | GEALSLLKKR |
| 901 | FSHRPVQEKF | VCLNCGFETH | ADEQAALNIA | RSWLFLRSQE | YKKYQTNKTT | GNTDKRAFVE |
| 961 | TWQSFYRKKL | KEVWKPAV. | | | | |

[0202] In some cases, a reference CasX protein is isolated or derived from Candidatus Sungbacteria having a sequence of

| (SEQ ID NO: 3) | | | | | | |
|---|---|---|---|---|---|---|
| 1 | MDNANKPSTK | SLVNTTRISD | HFGVTPGQVT | RVFSFGIIPT | KRQYAIIERW | FAAVEAARER |
| 61 | LYGMLYAHFQ | ENPPAYLKEK | FSYETFFKGR | PVLNGLRDID | PTIMTSAVFT | ALRHKAEGAM |
| 121 | AAFHTNHRRL | FEEARKKMRE | YAECLKANEA | LLRGAADIDW | DKIVNALRTR | LNTCLAPEYD |
| 181 | AVIADFGALC | AFRALIAETN | ALKGAYNHAL | NOMLPALVKV | DEPEEAEESP | RLRFENGRIN |
| 241 | DLPKFPVAER | ETPPDTETII | RQLEDMARVI | PDTAEILGYI | HRIRHKAARR | KPGSAVPLPQ |
| 301 | RVALYCAIRM | ERNPEEDPST | VAGHFLGEID | RVCEKRRQGL | VRTPFDSQIR | ARYMDIISFR |
| 361 | ATLAHPDRWT | EIQFLRSNAA | SRRVRAETIS | APFEGFSWTS | NRINPAPQYG | MALAKDANAP |
| 421 | ADAPELCICL | SPSSAAFSVR | EKGGDLIYMR | PTGGRRGKDN | PGKEITWVPG | SFDEYPASGV |
| 481 | ALKLRLYFGR | SQARRMLINK | TWGLLSDNPR | VFAANAELVG | KKRNPODRWK | LFFHMVISGP |
| 541 | PPVEYLDFSS | DVRSRARTVI | GINRGEVNPL | AYAVVSVEDG | QVLEEGLLGK | KEYIDQLIET |
| 601 | RRRISEYQSR | EQTPPRDLRQ | RVRHLQDTVL | GSARAKIHSL | IAFWKGILAI | ERLDDQFHGR |
| 661 | EQKIIPKKTY | LANKTGFMNA | LSFSGAVRVD | KKGNPWGGMI | EIYPGGISRT | CTQCGTVWLA |
| 721 | RRPKNPGHRD | AMVVIPDIVD | DAAATGFDNV | DCDAGTVDYG | ELFTLSREWV | RLTPRYSRVM |
| 781 | RGTLGDLERA | IRQGDDRKSR | QMLELALEPQ | PQWGOFFCHR | CGFNGQSDVL | AATNLARRAI |
| 841 | SLIRRLPDTD | TPPTP. | | | | |

b. Class 2, Type V CasX Variant Proteins

[0203] The present disclosure provides Class 2, Type V, CasX variants of a reference CasX protein or variants derived from other CasX variants (see, e.g., FIG. 44) (interchangeably referred to herein as “Class 2, Type V CasX variant”, “CasX variant” or “CasX variant protein”), wherein the Class 2, Type V CasX variants comprise at least one modification in at least one domain relative to the reference CasX protein, including but not limited to the sequences of SEQ ID NOS:1-3, or at least one modification relative to another CasX variant. Any change in amino acid sequence of a reference CasX protein or to another CasX variant protein that leads to an improved characteristic of the CasX protein is considered a CasX variant protein of the disclosure. For example, CasX variants can comprise one or more amino acid substitutions, insertions, deletions, or swapped domains, or any combinations thereof, relative to a reference CasX protein sequence.

[0204] The CasX variants of the disclosure have one or more improved characteristics compared to a reference CasX protein of SEQ ID NO:1, SEQ ID NO:2 or SEQ ID NO:3, or the variant from which it was derived; e.g. CasX 491 (SEQ ID NO: 336) or CasX 515 (SEQ ID NO: 416). Exemplary improved characteristics of the CasX variant embodiments include, but are not limited to improved folding of the variant, increased binding affinity to the gRNA, increased binding affinity to the target nucleic acid, improved ability to utilize a greater spectrum of PAM sequences in the editing and/or binding of target nucleic acid, improved unwinding of the target DNA, increased editing activity, improved editing efficiency, improved editing specificity for the target nucleic acid, decreased off-target editing or cleavage, increased percentage of a eukaryotic genome that can be efficiently edited, increased activity of the nuclease, increased target strand loading for double strand cleavage, decreased target strand loading for single strand nicking, increased binding of the non-target strand of DNA, improved protein stability, improved protein:gRNA (RNP) complex stability, and improved fusion characteristics. In the foregoing embodiments, the one or more of the improved characteristics of the CasX variant is at least about 1.1 to about 100,000-fold improved relative to the reference CasX protein of SEQ ID NO: 1, SEQ ID NO: 2, or SEQ ID NO: 3, or CasX 491 (SEQ ID NO: 336) or CasX 515 (SEQ ID NO: 416), when assayed in a comparable fashion. In other embodiments, the improvement is at least about 1.1-fold, at least about 2-fold, at least about 5-fold, at least about 10-fold, at least about 50-fold, at least about 100-fold, at least about 500-fold, at least about 1000-fold, at least about 5000-fold, at least about 10,000-fold, or at least about 100,000-fold compared to the reference CasX protein of SEQ ID NO: 1, SEQ ID NO: 2, or SEQ ID NO: 3, or CasX 491 or CasX 515. when assayed in a comparable fashion. In other cases, the one or more improved characteristics of an RNP of the CasX variant and the gRNA variant are at least about 1.1, at least about 10, at least about 100, at least about 1000, at least about 10,000, at least about 100,000-fold or more improved relative to an RNP of the reference CasX protein of SEQ ID NO:1, SEQ ID NO:2, or SEQ ID NO:3 and the gRNA of Table 1 or CasX 491 or CasX 515 with gRNA 174. In other cases, the one or more of the improved characteristics of an RNP of the CasX variant and the gRNA variant are about 1.1 to 100,00-fold, about 1.1 to 10,00-fold, about 1.1 to 1,000-fold, about 1.1 to 500-fold, about 1.1 to 100-fold, about 1.1 to 50-fold, about 1.1 to 20-fold, about 10 to 100,00-fold, about 10 to 10,00-fold, about 10 to 1,000-fold, about 10 to 500-fold, about 10 to 100-fold, about 10 to 50-fold, about 10 to 20-fold, about 2 to 70-fold, about 2 to 50-fold, about 2 to 30-fold, about 2 to 20-fold, about 2 to 10-fold, about 5 to 50-fold, about 5 to 30-fold, about 5 to 10-fold, about 100 to 100,00-fold, about 100 to 10,00-fold, about 100 to 1,000-fold, about 100 to 500-fold, about 500 to 100,00-fold, about 500 to 10,00-fold, about 500 to 1,000-fold, about 500 to 750-fold, about 1,000 to 100,00-fold, about 10,000 to 100,00-fold, about 20 to 500-fold, about 20 to 250-fold, about 20 to 200-fold, about 20 to 100-fold, about 20 to 50-fold, about 50 to 10,000-fold, about 50 to 1,000-fold, about 50 to 500-fold, about 50 to 200-fold, or about 50 to 100-fold, improved relative to an RNP of the reference CasX protein of SEQ ID NO:1, SEQ ID NO:2, or SEQ ID NO:3 and the gRNA of Table 1, or CasX 491 or CasX 515 with gRNA 174, when assayed in a comparable fashion. In other cases, the one or more improved characteristics of an RNP of the CasX variant and the gRNA variant are about 1.1-fold, 1.2-fold, 1.3-fold, 1.4-fold, 1.5-fold, 1.6-fold, 1.7-fold, 1.8-fold, 1.9-fold, 2-fold, 3-fold, 4-fold, 5-fold, 6-fold, 7-fold, 8-fold, 9-fold, 10-fold, 11-fold, 12-fold, 13-fold, 14-fold, 15-fold, 16-fold, 17-fold, 18-fold, 19-fold, 20-fold, 25-fold, 30-fold, 40-fold, 45-fold, 50-fold, 55-fold, 60-fold, 70-fold, 80-fold, 90-fold, 100-fold, 110-fold, 120-fold, 130-fold, 140-fold, 150-fold, 160-fold, 170-fold, 180-fold, 190-fold, 200-fold, 210-fold, 220-fold, 230-fold, 240-fold, 250-fold, 260-fold, 270-fold, 280-fold, 290-fold, 300-fold, 310-fold, 320-fold, 330-fold, 340-fold, 350-fold, 360-fold, 370-fold, 380-fold, 390-fold, 400-fold, 425-fold, 450-fold, 475-fold, or 500-fold improved relative to an RNP of the reference CasX protein of SEQ ID NO:1, SEQ ID NO:2, or SEQ ID NO:3 and the gRNA of Table 1, or CasX 491 or CasX 515 with gRNA 174, when assayed in a comparable fashion.

[0205] In some embodiments, the modification of the CasX variant is a mutation in one or more amino acids of the reference CasX. In other embodiments, the modification is an insertion or substitution of a part or all of a domain from a different CasX protein. In a particular embodiment, the CasX variants of SEQ ID NOS: 415-592 and 1147-1231 have a NTSB and helical 1B domain of SEQ ID NO: 1, while the other domains are derived from SEQ ID NO: 2, in addition to individual modifications in select domains, described herein. Mutations can be introduced in any one or more domains of the reference CasX protein or in a CasX variant to result in a CasX variant, and may include, for example, deletion of part or all of one or more domains, or one or more amino acid substitutions, deletions, or insertions in any domain of the reference CasX protein or the CasX variant from which it was derived. The domains of CasX proteins include the non-target strand binding (NTSB) domain, the target strand loading (TSL) domain, the Helical I domain, the Helical II domain, the oligonucleotide binding domain (OBD), and the RuvC DNA cleavage domain. Without being bound to theory or mechanism, a NTSB domain in a CasX allows for binding to the non-target nucleic acid strand and may aid in unwinding of the non-target and target strands. The NTSB domain is presumed to be responsible for the unwinding, or the capture, of a non-target nucleic acid strand in the unwound state. An exemplary NTSB domain comprises amino acids 100-190 of SEQ ID NO: 1 or amino acids 102-191 of SEQ ID NO: 2. In some embodiments, the NTSB domain of a reference CasX protein comprises a four-stranded beta sheet. In some embodiments, the TSL acts to place or capture the target-strand in a folded state that places the scissile phosphate of the target strand DNA backbone in the RuvC active site. An exemplary TSL comprises amino acids 824-933 of SEQ ID NO: 1 or amino acids 811-920 of SEQ ID NO: 2. Without wishing to be bound by theory, it is thought that in some cases the Helical I domain may contribute to binding of the protospacer adjacent motif (PAM). In some embodiments, the Helical I domain of a reference CasX protein comprises one or more alpha helices. Exemplary Helical I_I and I-II domains comprise amino acids 56-99 and 191-331 of SEQ ID NO: 1, respectively, or amino acids 58-101 and 192-332 of SEQ ID NO: 2, respectively. The Helical II domain is responsible for binding to the guide RNA scaffold stem loop as well as the bound DNA. An exemplary Helical II domain comprises amino acids 332-508 of SEQ ID NO: 1, or amino acids 333-500 of SEQ ID NO: 2. The OBD largely binds the RNA triplex of the guide RNA scaffold. The OBD may also be responsible for binding to the protospacer adjacent motif (PAM). Exemplary OBD I and II domains comprise amino acids 1-55 and 509-659 of SEQ ID NO: 1, respectively, or amino acids 1-57 and 501-646 of SEQ ID NO: 2, respectively. The RuvC has a DED motif active site that is responsible for cleaving both strands of DNA (one by one, most likely the non-target strand first at 11-14 nucleotides (nt) into the targeted sequence and then the target strand next at 2-4 nucleotides after the target sequence, resulting in a staggered cut). Specifically in CasX, the RuvC domain is unique in that it is also responsible for binding the guide RNA scaffold stem loop that is critical for CasX function. Exemplary RuvC I and II domains comprise amino acids 660-823 and 934-986 of SEQ ID NO: 1, respectively, or amino acids 647-810 and 921-978 of SEQ ID NO: 2, respectively, while CasX variants may comprise mutations at positions 1658 and A708 relative to SEQ ID NO: 2, or the mutations of CasX 515, described below.

[0206] In some embodiments, the CasX variant protein comprises at least one modification in at least 1 domain, in at least each of 2 domains, in at least each of 3 domains, in at least each of 4 domains or in at least each of 5 domains of the reference CasX protein, including the sequences of SEQ ID NOS: 1-3. In some embodiments, the CasX variant protein comprises two or more modifications in at least one domain of the reference CasX protein. In some embodiments, the CasX variant protein comprises at least two modifications in at least one domain of the reference CasX protein, at least three modifications in at least one domain of the reference CasX protein or at least four or more modifications in at least one domain of the reference CasX protein. In some embodiments, wherein the CasX variant comprises two or more modifications compared to a reference CasX protein, and each modification is made in a domain independently selected from the group consisting of a NTSB, TSL, Helical I domain, Helical II domain, OBD, and RuvC DNA cleavage domain. In some embodiments, wherein the CasX variant comprises two or more modifications compared to a reference CasX protein, a modification is made in two or more domains. In some embodiments, the at least one modification of the CasX variant protein comprises a deletion of at least a portion of one domain of the reference CasX protein of SEQ ID NOS: 1-3. In some embodiments, the deletion is in the NTSB domain, TSL domain, Helical I domain, Helical II domain, OBD, or RuvC DNA cleavage domain.

[0207] In some cases, the CasX variants of the disclosure comprise modifications in structural regions that may encompass one or more domains. In some embodiments, a CasX variant comprises at least one modification of a region of non-contiguous amino acid residues of the CasX variant that form a channel in which gRNA:target nucleic acid complexing with the CasX variant occurs. In other embodiments, a CasX variant comprises at least one modification of a region of non-contiguous amino acid residues of the CasX variant that form an interface which binds with the gRNA. In other embodiments, a CasX variant comprises at least one modification of a region of non-contiguous amino acid residues of the CasX variant that form a channel which binds with the non-target strand DNA. In other embodiments, a CasX variant comprises at least one modification of a region of non-contiguous amino acid residues of the CasX variant that form an interface which binds with the protospacer adjacent motif (PAM) of the target nucleic acid. In other embodiments, a CasX variant comprises at least one modification of a region of non-contiguous surface-exposed amino acid residues of the CasX variant. In other embodiments, a CasX variant comprises at least one modification of a region of non-contiguous amino acid residues that form a core through hydrophobic packing in a domain of the CasX variant. In the foregoing embodiments of the paragraph, the modifications of the region can comprise one or more of a deletion, an insertion, or a substitution of one or more amino acids of the region; or between 2 to 15 amino acid residues of the region of the CasX variant are substituted with charged amino acids; or between 2 to 15 amino acid residues of a region of the CasX variant are substituted with polar amino acids; or between 2 to 15 amino acid residues of a region of the CasX variant are substituted with amino acids that stack, or have affinity with DNA or RNA bases.

[0208] In other embodiments, the disclosure provides CasX variants wherein the CasX variants comprise at least one modification relative to another CasX variant; e.g., CasX variant 515 and 527 is a variant of CasX variant 491 and CasX variants 668 and 672 are variants of CasX 535 (see, FIG. 44). In some embodiments, the at least one modification is selected from the group consisting of an amino acid insertion, deletion, or substitution. All variants that improve one or more functions or characteristics of the CasX variant protein when compared to a reference CasX protein or the variant from which it was derived described herein are envisaged as being within the scope of the disclosure. As described in the Examples, a CasX variant can be mutagenized to create another CasX variant. In a particular embodiment, the disclosure provides, in Example 14, variants of CasX 515 (SEQ ID NO: 416) created by introducing modifications to the encoding sequence resulting in amino acid substitutions, deletions, or insertions at one or more positions in one or more domains.

[0209] Suitable mutagenesis methods for generating CasX variant proteins of the disclosure may include, for example, Deep Mutational Evolution (DME), deep mutational scanning (DMS), error prone PCR, cassette mutagenesis, random mutagenesis, staggered extension PCR, gene shuffling, or domain swapping (described in PCT/US20/36506 and WO2020247883A2, incorporated by reference herein). In some embodiments, the CasX variants are designed, for example by selecting multiple desired mutations in a CasX variant identified, for example, using the assays described in the Examples. In certain embodiments, the activity of a reference CasX or the CasX variant protein prior to mutagenesis is used as a benchmark against which the activity of one or more resulting CasX variants are compared, thereby measuring improvements in function of the new CasX variants.

[0210] In some embodiments of the CasX variants described herein, the at least one modification comprises: (a) a substitution of 1 to 100 consecutive or non-consecutive amino acids in the CasX variant compared to a reference CasX of SEQ ID NO:1, SEQ ID NO:2, SEQ ID NO:3, CasX variant 491 (SEQ ID NO: 336) or CasX variant 515 (SEQ ID NO: 416); (b) a deletion of 1 to 100 consecutive or non-consecutive amino acids in the CasX variant compared to a reference CasX or the variant from which it was derived; (c) an insertion of 1 to 100 consecutive or non-consecutive amino acids in the CasX compared to a reference CasX or the variant from which it was derived; or (d) any combination of (a)-(c). In some embodiments, the at least one modification comprises: (a) a substitution of 1-10 consecutive or non-consecutive amino acids in the CasX variant compared to a reference CasX of SEQ ID NO:1, SEQ ID NO:2, SEQ ID NO:3, or the variant from which it was derived; (b) a deletion of 1-5 consecutive or non-consecutive amino acids in the CasX variant compared to a reference CasX or the variant from which it was derived; (c) an insertion of 1-5 consecutive or non-consecutive amino acids in the CasX compared to a reference CasX or the variant from which it was derived; or (d) any combination of (a)-(c).

[0211] In some embodiments, the CasX variant protein comprises or consists of a sequence that has at least 1, at least 2, at least 3, at least 4, at least 5, at least 6, at least 7, at least 8, at least 9, at least 10, at least 20, at least 30, at least 40, at least 50, at least 60, at least 70, at lease 80, at least 90, or at least 100 alterations relative to the sequence of SEQ ID NO:1, SEQ ID NO:2, SEQ ID NO:3, CasX 491 or CasX 515. In some embodiments, the CasX variant protein comprises one more substitutions relative to CasX 491, or SEQ ID NO: 336. In some embodiments, the CasX variant protein comprises one more substitutions relative to CasX 515, or SEQ ID NO: 416. These alterations can be amino acid insertions, deletions, substitutions, or any combinations thereof. The alterations can be in one domain or in any domain or any combination of domains of the CasX variant. Any amino acid can be substituted for any other amino acid in the substitutions described herein. The substitution can be a conservative substitution (e.g., a basic amino acid is substituted for another basic amino acid). The substitution can be a non-conservative substitution (e.g., a basic amino acid is substituted for an acidic amino acid or vice versa). For example, a proline in a reference CasX protein can be substituted for any of arginine, histidine, lysine, aspartic acid, glutamic acid, serine, threonine, asparagine, glutamine, cysteine, glycine, alanine, isoleucine, leucine, methionine, phenylalanine, tryptophan, tyrosine or valine to generate a CasX variant protein of the disclosure.

[0212] Any permutation of the substitution, insertion and deletion embodiments described herein can be combined to generate a CasX variant protein of the disclosure. For example, a CasX variant protein can comprise at least one substitution and at least one deletion relative to a reference CasX protein sequence or a sequence of CasX 491 or CasX 515, at least one substitution and at least one insertion relative to a reference CasX protein sequence or a sequence of CasX 491 or CasX 515, at least one insertion and at least one deletion relative to a reference CasX protein sequence or a sequence of CasX 491 or CasX 515, or at least one substitution, one insertion and one deletion relative to a reference CasX protein sequence or a sequence of CasX 491 or CasX 515.

[0213] In some embodiments, the CasX variant protein comprises between 400 and 2000 amino acids, between 500 and 1500 amino acids, between 700 and 1200 amino acids, between 800 and 1100 amino acids, or between 900 and 1000 amino acids.

[0214] In some embodiments, a CasX variant protein comprises a sequence of SEQ ID NOS: 247-592 or 1147-1231 as set forth in Table 3. In some embodiments, a CasX variant protein consists of a sequence of SEQ ID NOS: 247-592 or 1147-1231 as set forth in Table 3. In other embodiments, a CasX variant protein comprises a sequence at least 60% identical, at least 65% identical, at least 70% identical, at least 75% identical, at least 80% identical, at least 81% identical, at least 82% identical, at least 83% identical, at least 84% identical, at least 85% identical, at least 86% identical, at least 86% identical, at least 87% identical, at least 88% identical, at least 89% identical, at least 89% identical, at least 90% identical, at least 91% identical, at least 92% identical, at least 93% identical, at least 94% identical, at least 95% identical, at least 96% identical, at least 97% identical, at least 98% identical, at least 99% identical, at least 99.5% identical to a sequence of SEQ ID NOS: 247-592 and 1147-1231 as set forth in Table 3. In some embodiments, a CasX variant protein comprises or consists of a sequence of SEQ ID NOS: 270-592 or 1147-1231. In other embodiments, a CasX variant protein comprises a sequence at least 60% identical, at least 65% identical, at least 70% identical, at least 75% identical, at least 80% identical, at least 81% identical, at least 82% identical, at least 83% identical, at least 84% identical, at least 85% identical, at least 86% identical, at least 86% identical, at least 87% identical, at least 88% identical, at least 89% identical, at least 89% identical, at least 90% identical, at least 91% identical, at least 92% identical, at least 93% identical, at least 94% identical, at least 95% identical, at least 96% identical, at least 97% identical, at least 98% identical, at least 99% identical, at least 99.5% identical to a sequence of SEQ ID NOS: 270-592 or 1147-1231. In some embodiments, a CasX variant protein comprises or consists of a sequence of SEQ ID NOS: 415-592 or 1147-1231. In other embodiments, a CasX variant protein comprises a sequence at least 60% identical, at least 65% identical, at least 70% identical, at least 75% identical, at least 80% identical, at least 81% identical, at least 82% identical, at least 83% identical, at least 84% identical, at least 85% identical, at least 86% identical, at least 86% identical, at least 87% identical, at least 88% identical, at least 89% identical, at least 89% identical, at least 90% identical, at least 91% identical, at least 92% identical, at least 93% identical, at least 94% identical, at least 95% identical, at least 96% identical, at least 97% identical, at least 98% identical, at least 99% identical, at least 99.5% identical to a sequence of SEQ ID NOS: 416-592 or 1147-1231. (ND=not described, or otherwise not provided).

TABLE 3
CasX Variant Sequences

| SEQ | Variant | |
|---|---|---|
| ID NO | No. | Description of Variant |
| 247 | ND | TSL, Helical I, Helical II, OBD and RuvC domains from SEQ ID NO: 2 and an NTSB domain |
| | | from SEQ ID NO: 1 |
| 248 | ND | NTSB, Helical I, Helical II, OBD and RuvC domains from SEQ ID NO: 2 and a TSL domain |
| | | from SEQ ID NO: 1. |
| 249 | ND | TSL, Helical I, Helical II, OBD and RuvC domains from SEQ ID NO: 1 and an NTSB domain |
| | | from SEQ ID NO: 2 |
| 250 | ND | NTSB, Helical I, Helical II, OBD and RuvC domains from SEQ ID NO: 1 and an TSL domain |
| | | from SEQ ID NO: 2. |
| 251 | ND | NTSB, TSL, Helical I, Helical II and OBD domains SEQ ID NO: 2 and an exogenous RuvC |
| | | domain or a portion thereof from a second CasX protein. |
| 252 | ND | No description |
| 253 | ND | NTSB, TSL, Helical II, OBD and RuvC domains from SEQ ID NO: 2 and a Helical I domain |
| | | from SEQ ID NO: 1 |
| 254 | ND | NTSB, TSL, Helical I, OBD and RuvC domains from SEQ ID NO: 2 and a Helical II domain |
| | | from SEQ ID NO: 1 |
| 255 | ND | NTSB, TSL, Helical I, Helical II and RuvC domains from a first CasX protein and an |
| | | exogenous OBD or a part thereof from a second CasX protein |
| 256 | ND | No description |
| 257 | ND | No description |
| 258 | ND | substitution of L379R, a substitution of C477K, a substitution of A708K, a deletion of P at |
| | | position 793 and a substitution of T620P of SEQ ID NO: 2 |
| 259 | ND | substitution of M771A of SEQ ID NO: 2. |
| 260 | ND | substitution of L379R, a substitution of A708K, a deletion of P at position 793 and a |
| | | substitution of D732N of SEQ ID NO: 2. |
| 261 | ND | substitution of W782Q of SEQ ID NO: 2. |
| 262 | ND | substitution of M771Q of SEQ ID NO: 2 |
| 263 | ND | substitution of R4581 and a substitution of A739V of SEQ ID NO: 2. |
| 264 | ND | L379R, a substitution of A708K, a deletion of P at position 793 and a substitution of M771N |
| | | of SEQ ID NO: 2 |
| 265 | ND | substitution of L379R, a substitution of A708K, a deletion of P at position 793 and a |
| | | substitution of A739T of SEQ ID NO: 2 |
| 266 | ND | substitution of L379R, a substitution of C477K, a substitution of A708K, a deletion of P at |
| | | position 793 and a substitution of D489S of SEQ ID NO: 2. |
| 267 | ND | substitution of L379R, a substitution of C477K, a substitution of A708K, a deletion of P at |
| | | position 793 and a substitution of D732N of SEQ ID NO: 2. |
| 268 | ND | substitution of V711K of SEQ ID NO: 2. |
| 269 | ND | substitution of L379R, a substitution of C477K, a substitution of A708K, a deletion of P at |
| | | position 793 and a substitution of Y797L of SEQ ID NO: 2. |
| 270 | 119 | ND |
| 283 | 429 | ND |
| 284 | 430 | ND |
| 285 | 431 | ND |
| 286 | 432 | ND |
| 287 | 433 | ND |
| 288 | 434 | ND |
| 289 | 435 | ND |
| 290 | 436 | ND |
| 291 | 437 | ND |
| 292 | 438 | ND |
| 293 | 439 | ND |
| 294 | 440 | ND |
| 295 | 441 | ND |
| 296 | 442 | ND |
| 297 | 443 | ND |
| 298 | 444 | ND |
| 299 | 445 | ND |
| 300 | 446 | ND |
| 301 | 447 | ND |
| 302 | 448 | ND |
| 303 | 449 | ND |
| 304 | 450 | ND |
| 305 | 451 | ND |
| 306 | 452 | ND |
| 307 | 453 | ND |
| 308 | 454 | ND |
| 309 | 455 | ND |
| 310 | 456 | ND |
| 311 | 457 | ND |
| 312 | 458 | ND |
| 313 | 459 | ND |
| 314 | 460 | ND |
| 315 | 278 | ND |
| 316 | 279 | ND |
| 317 | 280 | ND |
| 318 | 285 | ND |
| 319 | 286 | ND |
| 320 | 287 | ND |
| 321 | 288 | ND |
| 322 | 290 | ND |
| 323 | 291 | ND |
| 324 | 293 | ND |
| 325 | 300 | ND |
| 326 | 492 | ND |
| 327 | 493 | ND |
| 328 | 387 | ND |
| 329 | 395 | ND |
| 330 | 485 | ND |
| 331 | 486 | ND |
| 332 | 487 | ND |
| 333 | 488 | ND |
| 334 | 489 | ND |
| 335 | 490 | ND |
| 336 | 491 | ND |
| 337 | 494 | ND |
| 411 | 328 | ND |
| 412 | 388 | ND |
| 413 | 389 | ND |
| 414 | 390 | ND |
| 415 | 514 | ND |
| 416 | 515 | ND |
| 417 | 516 | ND |
| 418 | 517 | ND |
| 419 | 518 | ND |
| 420 | 519 | ND |
| 421 | 520 | ND |
| 422 | 522 | ND |
| 423 | 523 | ND |
| 424 | 524 | ND |
| 425 | 525 | ND |
| 426 | 526 | ND |
| 427 | 527 | ND |
| 428 | 528 | ND |
| 429 | 529 | ND |
| 430 | 530 | ND |
| 431 | 531 | ND |
| 432 | 532 | ND |
| 433 | 533 | ND |
| 434 | 534 | ND |
| 435 | 535 | ND |
| 436 | 536 | ND |
| 437 | 537 | ND |
| 438 | 538 | ND |
| 439 | 539 | ND |
| 440 | 540 | ND |
| 441 | 541 | ND |
| 442 | 542 | ND |
| 443 | 543 | ND |
| 444 | 544 | ND |
| 445 | 545 | ND |
| 446 | 546 | ND |
| 447 | 547 | ND |
| 448 | 548 | ND |
| 449 | 550 | ND |
| 450 | 551 | ND |
| 451 | 552 | ND |
| 452 | 553 | ND |
| 453 | 554 | ND |
| 454 | 555 | ND |
| 455 | 556 | ND |
| 456 | 557 | ND |
| 457 | 558 | ND |
| 458 | 559 | ND |
| 459 | 560 | ND |
| 460 | 561 | ND |
| 461 | 562 | ND |
| 462 | 563 | ND |
| 563 | 564 | ND |
| 464 | 565 | ND |
| 465 | 566 | ND |
| 466 | 567 | ND |
| 467 | 568 | ND |
| 468 | 569 | ND |
| 469 | 570 | ND |
| 470 | 571 | ND |
| 471 | 572 | ND |
| 472 | 573 | ND |
| 473 | 574 | ND |
| 474 | 575 | ND |
| 475 | 576 | ND |
| 476 | 577 | ND |
| 477 | 578 | ND |
| 478 | 579 | ND |
| 479 | 580 | ND |
| 480 | 581 | ND |
| 481 | 582 | ND |
| 482 | 583 | ND |
| 483 | 584 | ND |
| 484 | 585 | ND |
| 485 | 586 | ND |
| 486 | 587 | ND |
| 487 | 588 | ND |
| 488 | 589 | ND |
| 489 | 590 | ND |
| 490 | 591 | ND |
| 491 | 592 | ND |
| 492 | 593 | ND |
| 493 | 594 | ND |
| 494 | 595 | ND |
| 495 | 596 | ND |
| 496 | 597 | ND |
| 497 | 598 | ND |
| 498 | 599 | ND |
| 499 | 600 | ND |
| 500 | 601 | ND |
| 501 | 602 | ND |
| 502 | 603 | ND |
| 503 | 604 | ND |
| 504 | 605 | ND |
| 505 | 606 | ND |
| 506 | 607 | ND |
| 507 | 608 | ND |
| 508 | 609 | ND |
| 509 | 610 | ND |
| 510 | 611 | ND |
| 511 | 612 | ND |
| 512 | 613 | ND |
| 513 | 614 | ND |
| 514 | 615 | ND |
| 515 | 616 | ND |
| 516 | 617 | ND |
| 517 | 618 | ND |
| 518 | 619 | ND |
| 519 | 620 | ND |
| 520 | 621 | ND |
| 521 | 622 | ND |
| 522 | 623 | ND |
| 523 | 624 | ND |
| 524 | 625 | ND |
| 525 | 626 | ND |
| 526 | 627 | ND |
| 527 | 628 | ND |
| 528 | 629 | ND |
| 529 | 630 | ND |
| 530 | 631 | ND |
| 531 | 632 | ND |
| 532 | 633 | ND |
| 533 | 634 | ND |
| 534 | 635 | ND |
| 535 | 636 | ND |
| 536 | 637 | ND |
| 537 | 638 | ND |
| 538 | 639 | ND |
| 539 | 640 | ND |
| 540 | 641 | ND |
| 541 | 642 | ND |
| 542 | 643 | ND |
| 543 | 644 | ND |
| 544 | 645 | ND |
| 545 | 646 | ND |
| 546 | 647 | ND |
| 547 | 648 | ND |
| 548 | 649 | ND |
| 549 | 650 | ND |
| 550 | 651 | ND |
| 551 | 652 | ND |
| 552 | 653 | ND |
| 553 | 654 | ND |
| 554 | 655 | ND |
| 555 | 656 | ND |
| 556 | 657 | ND |
| 557 | 658 | ND |
| 558 | 659 | ND |
| 559 | 660 | ND |
| 560 | 661 | ND |
| 561 | 662 | ND |
| 562 | 663 | ND |
| 563 | 664 | ND |
| 564 | 665 | ND |
| 565 | 666 | ND |
| 566 | 667 | ND |
| 567 | 668 | ND |
| 568 | 669 | ND |
| 569 | 671 | ND |
| 570 | 672 | ND |
| 571 | 673 | ND |
| 572 | 674 | ND |
| 573 | 675 | ND |
| 574 | 676 | ND |
| 575 | 677 | ND |
| 576 | 678 | ND |
| 577 | 679 | ND |
| 578 | 680 | ND |
| 579 | 681 | ND |
| 580 | 682 | ND |
| 581 | 683 | ND |
| 582 | 684 | ND |
| 583 | 685 | ND |
| 584 | 686 | ND |
| 585 | 687 | ND |
| 586 | 688 | ND |
| 587 | 689 | ND |
| 588 | 690 | ND |
| 589 | 691 | ND |
| 590 | 692 | ND |
| 591 | 693 | ND |
| 592 | 694 | ND |
| 1147 | 701 | ND |
| 1148 | 702 | ND |
| 1149 | 703 | ND |
| 1150 | 704 | ND |
| 1151 | 705 | ND |
| 1152 | 706 | ND |
| 1153 | 707 | ND |
| 1154 | 708 | ND |
| 1155 | 709 | ND |
| 1156 | 710 | ND |
| 1157 | 711 | ND |
| 1158 | 712 | ND |
| 1159 | 713 | ND |
| 1160 | 714 | ND |
| 1161 | 715 | ND |
| 1162 | 716 | ND |
| 1163 | 717 | ND |
| 1164 | 718 | ND |
| 1165 | 719 | ND |
| 1166 | 720 | ND |
| 1167 | 721 | ND |
| 1168 | 722 | ND |
| 1169 | 723 | ND |
| 1170 | 724 | ND |
| 1171 | 725 | ND |
| 1172 | 726 | ND |
| 1173 | 727 | ND |
| 1174 | 728 | ND |
| 1175 | 729 | ND |
| 1176 | 730 | ND |
| 1177 | 731 | ND |
| 1178 | 732 | ND |
| 1179 | 733 | ND |
| 1180 | 734 | ND |
| 1181 | 735 | ND |
| 1182 | 736 | ND |
| 1183 | 737 | ND |
| 1184 | 738 | ND |
| 1185 | 739 | ND |
| 1186 | 740 | ND |
| 1187 | 741 | ND |
| 1188 | 742 | ND |
| 1189 | 743 | ND |
| 1190 | 744 | ND |
| 1191 | 745 | ND |
| 1192 | 746 | ND |
| 1193 | 747 | ND |
| 1194 | 748 | ND |
| 1195 | 749 | ND |
| 1196 | 750 | ND |
| 1197 | 75 | ND |
| 1198 | 752 | ND |
| 1199 | 753 | ND |
| 1200 | 754 | ND |
| 1201 | 755 | ND |
| 1202 | 756 | ND |
| 1203 | 757 | ND |
| 1204 | 758 | ND |
| 1205 | 759 | ND |
| 1206 | 760 | ND |
| 1207 | 761 | ND |
| 1208 | 762 | ND |
| 1209 | 763 | ND |
| 1210 | 764 | ND |
| 1211 | 765 | ND |
| 1212 | 766 | ND |
| 1213 | 767 | ND |
| 1214 | 768 | ND |
| 1215 | 769 | ND |
| 1216 | 770 | ND |
| 1217 | 777 | ND |
| 1218 | 778 | ND |
| 1219 | 779 | ND |
| 1220 | 780 | ND |
| 1221 | 781 | ND |
| 1222 | 782 | ND |
| 1223 | 783 | ND |
| 1224 | 784 | ND |
| 1225 | 785 | ND |
| 1226 | 786 | ND |
| 1227 | 787 | ND |
| 1228 | 788 | ND |
| 1229 | 789 | ND |
| 1230 | 790 | ND |
| 1231 | 791 | ND |

c. CasX Variant Proteins with Domains from Multiple Source Proteins

[0215] In certain embodiments, the disclosure provides a chimeric CasX protein comprising protein domains from two or more different CasX proteins, such as two or more naturally occurring CasX proteins, or two or more CasX variant protein sequences as described herein. As used herein, a “chimeric CasX protein” refers to a CasX containing at least two domains isolated or derived from different sources, such as two naturally occurring proteins, which may, in some embodiments, be isolated from different species. For example, in some embodiments, a chimeric CasX protein comprises a first domain from a first CasX protein and a second domain from a second, different CasX protein. In some embodiments, the first domain can be selected from the group consisting of the NTSB, TSL, helical I, helical II, OBD and RuvC domains. In some embodiments, the second domain is selected from the group consisting of the NTSB, TSL, helical I, helical II, OBD and RuvC domains with the second domain being different from the foregoing first domain. In a particular embodiment, the CasX variants of 514-791 (SEQ ID NOS: 415-592 and 1147-1231) have a NTSB and helical 1B domain derived from the sequence of SEQ ID NO: 1, while the other domains are derived from SEQ ID NO: 2, it being understood that the variants have additional amino acid changes at select locations.

d. Protein Affinity for the gRNA

[0216] In some embodiments, a CasX variant protein has improved affinity for the gRNA relative to a reference CasX protein, leading to the formation of the ribonucleoprotein complex (RNP). Increased affinity of the CasX variant protein for the gRNA may, for example, result in a lower K_{d} for the generation of a RNP complex, which can, in some cases, result in a more stable ribonucleoprotein complex formation. In some embodiments, increased affinity of the CasX variant protein for the gRNA results in increased stability of the ribonucleoprotein complex when delivered to human cells. This increased stability can affect the function and utility of the complex in the cells of a subject, as well as result in improved pharmacokinetic properties in blood, when delivered to a subject. In some embodiments, increased affinity of the CasX variant protein, and the resulting increased stability of the ribonucleoprotein complex, allows for a lower dose of the CasX variant protein to be delivered to the subject or cells while still having the desired activity, for example in vivo or in vitro gene editing. In some embodiments, a higher affinity (tighter binding) of a CasX variant protein to a gRNA allows for a greater amount of editing events when both the CasX variant protein and the gRNA remain in an RNP complex. Increased editing events can be assessed using editing assays such as the tdTom editing assays described herein. In some embodiments, the K_{d} of a CasX variant protein for a gRNA is increased relative to a reference CasX protein by a factor of at least about 1.1, at least about 1.2, at least about 1.3, at least about 1.4, at least about 1.5, at least about 1.6, at least about 1.7, at least about 1.8, at least about 1.9, at least about 2, at least about 3, at least about 4, at least about 5, at least about 6, at least about 7, at least about 8, at least about 9, at least about 10, at least about 15, at least about 20, at least about 25, at least about 30, at least about 35, at least about 40, at least about 45, at least about 50, at least about 60, at least about 70, at least about 80, at least about 90, or at least about 100. In some embodiments, the CasX variant has about 1.1 to about 10-fold increased binding affinity to the gRNA compared to the reference CasX protein of SEQ ID NO: 2.

[0217] In some embodiments, increased affinity of the CasX variant protein for the gRNA results in increased stability of the ribonucleoprotein complex when delivered to mammalian cells, including in vivo delivery to a subject. This increased stability can affect the function and utility of the complex in the cells of a subject, as well as result in improved pharmacokinetic properties in blood, when delivered to a subject. In some embodiments, increased affinity of the CasX variant protein, and the resulting increased stability of the ribonucleoprotein complex, allows for a lower dose of the CasX variant protein to be delivered to the subject or cells while still having the desired activity; for example in vivo or in vitro gene editing. The increased ability to form RNP and keep them in stable form can be assessed using assays such as the in vitro cleavage assays described in the Examples herein. In some embodiments, RNP comprising the CasX variants of the disclosure are able to achieve a k_{cleave} rate when complexed as an RNP that is at last 2-fold, at least 5-fold, or at least 10-fold higher compared to RNP comprising a reference CasX of SEQ ID NOS: 1-3.

[0218] In some embodiments, a higher affinity (tighter binding) of a CasX variant protein to a gRNA allows for a greater amount of editing events when both the CasX variant protein and the gRNA remain in an RNP complex. Increased editing events can be assessed using editing assays such as the assays described herein.

[0219] Without wishing to be bound by theory, in some embodiments amino acid changes in the helical I domain can increase the binding affinity of the CasX variant protein with the gRNA targeting sequence, while changes in the helical II domain can increase the binding affinity of the CasX variant protein with the gRNA scaffold stem loop, and changes in the oligonucleotide binding domain (OBD) increase the binding affinity of the CasX variant protein with the gRNA triplex.

[0220] Methods of measuring CasX protein binding affinity for a gRNA include in vitro methods using purified CasX protein and gRNA. The binding affinity for reference CasX and variant proteins can be measured by fluorescence polarization if the gRNA or CasX protein is tagged with a fluorophore. Alternatively, or in addition, binding affinity can be measured by biolayer interferometry, electrophoretic mobility shift assays (EMSAs), or filter binding. Additional standard techniques to quantify absolute affinities of RNA binding proteins such as the reference CasX and variant proteins of the disclosure for specific gRNAs such as reference gRNAs and variants thereof include, but are not limited to, isothermal calorimetry (ITC), and surface plasmon resonance (SPR), as well as the methods of the Examples.

[0221] catalytically-deadIn some embodiments, the CasX variant protein comprises one or more modifications in a region of non-contiguous residues that form a channel in which gRNA:target nucleic acid complexing occurs. In some embodiments, the CasX variant protein comprises one or more modifications comprising a region of non-contiguous residues that form an interface which binds with the gRNA. For example, in some embodiments of a reference CasX protein, the helical I, helical II and OBD domains all contact or are in proximity to the gRNA:target nucleic acid complex, and one or more modifications to non-contiguous residues within any of these domains may improve function of the CasX variant protein.

[0222] In some embodiments, the CasX variant protein comprises one or more modifications in a region of non-contiguous residues that form a channel which binds with the non-target strand DNA. For example, a CasX variant protein can comprise one or more modifications to non-contiguous residues of the NTSB domain. In some embodiments, the CasX variant protein comprises one or more modifications in a region of non-contiguous residues that form an interface which binds with the PAM. For example, a CasX variant protein can comprise one or more modifications to non-contiguous residues of the helical I domain or OBD. In some embodiments, the CasX variant protein comprises one or more modifications comprising a region of non-contiguous surface-exposed residues. As used herein, “surface-exposed residues” refers to amino acids on the surface of the CasX protein, or amino acids in which at least a portion of the amino acid, such as the backbone or a part of the side chain is on the surface of the protein. Surface exposed residues of cellular proteins such as CasX, which are exposed to an aqueous intracellular environment, are frequently selected from positively charged hydrophilic amino acids, for example arginine, asparagine, aspartate, glutamine, glutamate, histidine, lysine, serine, and threonine. Thus, for example, in some embodiments of the variants provided herein, a region of surface exposed residues comprises one or more insertions, deletions, or substitutions compared to a reference CasX protein. In some embodiments, one or more positively charged residues are substituted for one or more other positively charged residues, or negatively charged residues, or uncharged residues, or any combinations thereof. In some embodiments, one or more amino acids residues for substitution are near bound nucleic acid, for example residues in the RuvC domain or helical I domain that contact target nucleic acid, or residues in the OBD or helical II domain that bind the gRNA, can be substituted for one or more positively charged or polar amino acids.

[0223] In some embodiments, the CasX variant protein comprises one or more modifications in a region of non-contiguous residues that form a core through hydrophobic packing in a domain of the reference CasX protein. Without wishing to be bound by any theory, regions that form cores through hydrophobic packing are rich in hydrophobic amino acids such as valine, isoleucine, leucine, methionine, phenylalanine, tryptophan, and cysteine. For example, in some reference CasX proteins, RuvC domains comprise a hydrophobic pocket adjacent to the active site. In some embodiments, between 2 to 15 residues of the region are charged, polar, or base-stacking. Charged amino acids (sometimes referred to herein as residues) may include, for example, arginine, lysine, aspartic acid, and glutamic acid, and the side chains of these amino acids may form salt bridges provided a bridge partner is also present (see FIG. 14). Polar amino acids may include, for example, glutamine, asparagine, histidine, serine, threonine, tyrosine, and cysteine. Polar amino acids can, in some embodiments, form hydrogen bonds as proton donors or acceptors, depending on the identity of their side chains. As used herein, “base-stacking” includes the interaction of aromatic side chains of an amino acid residue (such as tryptophan, tyrosine, phenylalanine, or histidine) with stacked nucleotide bases in a nucleic acid. Any modification to a region of non-contiguous amino acids that are in close spatial proximity to form a functional part of the CasX variant protein is envisaged as within the scope of the disclosure.

e. CasX Variant Proteins with Domains from Multiple Source Proteins

[0224] In certain embodiments, the disclosure provides a chimeric CasX variant protein comprising protein domains from two or more different CasX proteins, such as two or more naturally occurring CasX proteins, or two or more CasX variant protein sequences as described herein. As used herein, a “chimeric CasX protein” refers to a CasX containing at least two domains isolated or derived from different sources, such as two naturally occurring proteins, which may, in some embodiments, be isolated from different species. For example, in some embodiments, a chimeric CasX protein comprises a first domain from a first CasX protein and a second domain from a second, different CasX protein. In some embodiments, the first domain can be selected from the group consisting of the NTSB, TSL, helical I, helical II, OBD and RuvC domains. In some embodiments, the second domain is selected from the group consisting of the NTSB, TSL, helical I, helical II, OBD and RuvC domains with the second domain being different from the foregoing first domain. For example, a chimeric CasX protein may comprise an NTSB, TSL, helical I, helical II, OBD domains from a CasX protein of SEQ ID NO: 2, and a RuvC domain from a CasX protein of SEQ ID NO: 1, or vice versa. As a further example, a chimeric CasX protein may comprise an NTSB, TSL, helical II, OBD and RuvC domain from CasX protein of SEQ ID NO: 2, and a helical I domain from a CasX protein of SEQ ID NO: 1, or vice versa. Thus, in certain embodiments, a chimeric CasX protein may comprise an NTSB, TSL, helical II, OBD and RuvC domain from a first CasX protein, and a helical I domain from a second CasX protein. In some embodiments of the chimeric CasX proteins, the domains of the first CasX protein are derived from the sequences of SEQ ID NO: 1, SEQ ID NO: 2 or SEQ ID NO: 3, and the domains of the second CasX protein are derived from the sequences of SEQ ID NO: 1, SEQ ID NO: 2 or SEQ ID NO: 3, and the first and second CasX proteins are not the same. In some embodiments, domains of the first CasX protein comprise sequences derived from SEQ ID NO: 1 and domains of the second CasX protein comprise sequences derived from SEQ ID NO: 2. In some embodiments, domains of the first CasX protein comprise sequences derived from SEQ ID NO: 1 and domains of the second CasX protein comprise sequences derived from SEQ ID NO: 3. In some embodiments, domains of the first CasX protein comprise sequences derived from SEQ ID NO: 2 and domains of the second CasX protein comprise sequences derived from SEQ ID NO: 3. As an example of the foregoing, the chimeric RuvC domain comprises amino acids 660 to 823 of SEQ ID NO: 1 and amino acids 921 to 978 of SEQ ID NO: 2. As an alternative example of the foregoing, a chimeric RuvC domain comprises amino acids 647 to 810 of SEQ ID NO: 2 and amino acids 934 to 986 of SEQ ID NO: 1. In some embodiments, the at least one chimeric domain comprises a chimeric helical I domain wherein the chimeric helical I domain comprises amino acids 56-99 of SEQ ID NO: 1 and amino acids 192-332 of SEQ ID NO: 2. In some embodiments, the chimeric CasX variant is further modified, including the CasX variants selected from the group consisting of the sequences of SEQ ID NO: 270, SEQ ID NO: 328, SEQ ID NO: 336, SEQ ID NO: 780, SEQ ID NO: 412, SEQ ID NO: 413, SEQ ID NO: 414, SEQ ID NO: 416, SEQ ID NO: 435, SEQ ID NO: 329, SEQ ID NO: 781, SEQ ID NO: 330, SEQ ID NO: 782, SEQ ID NO: 331, SEQ ID NO: 783, SEQ ID NO: 332, SEQ ID NO: 784, SEQ ID NO: 333, SEQ ID NO: 785, SEQ ID NO: 334, SEQ ID NO: 786, SEQ ID NO: 335, SEQ ID NO: 567, SEQ ID NO: 570, SEQ ID NO: 574,SEQ ID NO: 787, and SEQ ID NO: 788. In some embodiments, the one or more additional modifications comprises an insertion, substitution or deletion as described herein.

[0225] In the case of split or non-contiguous domains such as helical I, RuvC and OBD, a portion of the non-contiguous domain can be replaced with the corresponding portion from any other source. For example, the helical I-I domain (sometimes referred to as helical I-a) in SEQ ID NO: 2 can be replaced with the corresponding helical I-I sequence from SEQ ID NO: 1, and the like. Domain sequences from reference CasX proteins, and their coordinates, are shown in Table 4. Representative examples of chimeric CasX proteins include the variants of CasX 472-483, 485-491 and 515, the sequences of which are set forth in Table 3.

TABLE 4
Domain coordinates in Reference CasX proteins

| Domain Name | Coordinates in SEQ ID NO: 1 | Coordinates in SEQ ID NO: 2 |
|---|---|---|
| OBD-I | 1-55 | 1-57 |
| helical I-I | 56-99 | 58-101 |
| NTSB | 100-190 | 102-191 |
| helical I-II | 191-331 | 192-332 |
| helical II | 332-508 | 333-500 |
| OBD-II | 509-659 | 501-646 |
| RuvC-I | 660-823 | 647-810 |
| TSL | 824-933 | 811-920 |
| RuvC-II | 934-986 | 921-978 |

*OBD I and II, helical I-I and I-II, and RuvC I and II are also referred to herein as OBD a and b, helical I a and b, and RuvC a and b.

[0226] Exemplary domain sequences are provided in Table 5 below.

TABLE 5
Exemplary Domain Sequences

| | | |
|---|---|---|
| SEQ | | |
| ID | Domain | Sequence |

Deltaproteobacter sp. (reference CasX of SEQ ID NO: 1)

| | | |
|---|---|---|
| 2333 | OBD-I | EKRINKIRKKLSADNATKPVSRSGPMKTLLVRVMTDDLKKRLEKRRKKPEVMPQ |
| 2334 | helical | VISNNAANNLRMLLDDYTKMKEAILQVYWQEFKDDHVGLMCKFA |
| | I-I | |
| 2335 | NTSB | QPASKKIDQNKLKPEMDEKGNLTTAGFACSQCGQPLFVYKLEQVSEKGKAYTNY |
| | | FGRCNVAEHEKLILLAQLKPEKDSDEAVTYSLGKFGQ |
| 2336 | helical | RALDFYSIHVTKESTHPVKPLAQIAGNRYASGPVGKALSDACMGTIASFLSKYQ |
| | I-II | DIIIEHQKVVKGNQKRLESLRELAGKENLEYPSVTLPPQPHTKEGVDAYNEVIA |
| | | RVRMWVNLNLWQ KLKLSRDDAKPLLRLKGFPSF |
| 2337 | helical | PVVERRENEVDWWNTINEVKKLIDAKRDMGRVFWSGVTAEKRNTILEGYNYLP |
| | II | NENDHKKREGSLENPKKPAKRQFGDLLLYLEKKYAGDWGKVFDEAWERIDKKI |
| | | AGLTSHIEREEARNAEDAQSKAVLTDWLRAKASFVLERLKEMDEKEFYACEIQL |
| | | QKWYGDLRG NPFAVEAE |
| 2338 | OBD-II | NRVVDISGFSIGSDGHSIQYRNLLAWKYLENGKREFYLLMNYGKKGRIRFTDGTD |
| | | IKKSGKWQGLLYGGGKAKVIDLTFDPDDEQLIILPLAFGTRQGREFIWNDLLSLE |
| | | TGLIKLANGRVIEKTIYNKKIG RDEPALFVALTFERREVVD |
| 2339 | RuvC-I | PSNIKPVNLIGVDRGENIPAVIALTDPEGCPLPEFKDSSGGPTDILRIGEGYKEK |
| | | QRAIQAAKEVEQRRAGGYSRKFASKSRNLADDMVRNSARDLFYHAVTHDAVLVFE |
| | | NLSRGFGRQGKRTFMTERQYTKMEDWLTAKLAYEGLTSKTYLSKTLAQYTSKTC |
| 2340 | TSL | SNCGFTITTADYDGMLVRLKKTSDGWATTLNNKELKAEGQITYYNRYKRQTVE |
| | | KELSAELDRLSEESGNNDISKWTKGRRDEALFLLKKRFSHRPVQEQFVCLDCGHE |
| | | VH |
| 2341 | RuvC-II | ADEQAALNIARSWLFLN SNSTEFKSYKSGKQPFVGAWQAFYKRRLKEVWKPNA |

Planctomycetes sp. (Reference CasX of SEQ ID NO: 2)

| | | |
|---|---|---|
| 2342 | OBD-I | QEIKRINKIRRRLVKDSNTKKAGKTGPMKTLLVRVMTPDLRERLENLRKKPEN |
| | | IPQ |
| 2343 | helical | PISNTSRANLNKLLTDYTEMKKAILHVYWEEFQKDPVGLMSRVA |
| | I-II | |
| 2344 | NTSB | QPAPKNIDQRKLIPVKDGNERLTSSGFACSQCCQPLYVYKLEQVNDKGKPHTNYF |
| | | GRCNVSEHERLILLSPHKPEANDELVTYSLGKFGQ |
| 2345 | helical | RALDFYSIHVTRESNHPVKPLEQIGGNSCASGPVGKALSDACMGAVASFLTKYQ |
| | I-II | DIILEHQKVIKKNEKRLANLKDIASANGLAFPKITLPPQPHTKEGIEAYNNVVAQ |
| | | IVIWVNLNLWQKLKIGRDEAKPLQRLKGFPSF |
| 2346 | helical | PLVERQANEVDWWDMVCNVKKLINEKKEDGKVFWQNLAGYKRQEALLPYLSS |
| | II | EEDRKKGKKFARYQFGDLLLHLEKKHGEDWGKVYDEAWERIDKKVEGLSKHIK |
| | | LEEERRSEDAQSKAALTDWLRAKASFVIEGLKEADKDEFCRCELKLQKWYGDLR |
| | | GKPFAIEAE |
| 2347 | OBD-II | NSILDISGFSKQYNCAFIWQKDGVKKLNLYLIINYFKGGKLRFKKIKPEAFEANR |
| | | FYTVINKKSGEIVPMEVNENFDDPNLIILPLAFGKRQGREFIWNDLLSLETGSLK |
| | | LANGRVIEKTLYNRRTRQDEPALFVALTFERREVLD |
| 2348 | RuvC-I | SSNIKPMNLIGIDRGENIPAVIALTDPEGCPLSRFKDSLGNPTHILRIGESYKEK |
| | | QRTIQAAKEVEQRRAGGYSRKYASKAKNLADDMVRNTARDLLYYAVTQDAMLIFE |
| | | NLSRGFGRQGKRTFMAERQYTRMEDWLTAKLAYEGLPSKTYLSKTLAQYTSKTC |
| 2349 | TSL | SNCGFTITSADYDRVLEKLKKTATGWMTTINGKELKVEGQITYYNRYKRQNVVKD |
| | | LSVELDRLSEESVNNDISSWTKGRSGEALSLLKKRFSHRPVQEKFVCLNCGFETH |
| 2350 | RuvC-II | ADEQAALNIARSWLFLRSQEYKKYQTNKTTGNTDKRAFVETWQSFYRKKLKEV |
| | | WKPAV |

[0227] A further exemplary helical II domain sequence is provided as SEQ ID NO: 2351, and a further exemplary RuvC a domain sequence is provided as SEQ ID NO: 2352.

[0228] In other embodiments, a CasX variant protein comprises a sequence of SEQ ID NOS: 247-592 or 1147-1231 as set forth in Table 3, and further comprises one or more NLS disclosed herein at or near either the N-terminus, the C-terminus, or both. In other embodiments, a CasX variant protein comprises a sequence of SEQ ID NOS: 270-592 and 1147-1231, and further comprises one or more NLS disclosed herein at or near either the N-terminus, the C-terminus, or both. In other embodiments, a CasX variant protein comprises a sequence of SEQ ID NOS: 415-592 and 1147-1231, and further comprises one or more NLS disclosed herein at or near either the N-terminus, the C-terminus, or both. It will be understood that in some cases, the N-terminal methionine of the CasX variants of the Tables is removed from the expressed CasX variant during post-translational modification. The person of ordinary skill in the art will understand that an NLS near the N or C terminus of a protein can be within 1, 2, 3, 4, 5, 6, 7, 8, 9, 10, 11, 12, 13, 14, 15, 16, 17, 18, 20 or 20 amino acids of the N or C terminus.

f. CasX Variants Derived from Other CasX Variants

[0229] In further iterations of the generation of variant proteins, a variant protein can be utilized to generate additional CasX variants of the disclosure. For example, and as illustrated in FIG. 44, CasX 119 (SEQ ID NO: 270), CasX 491 (SEQ ID NO: 336), and CasX 515 (SEQ ID NO: 416) are exemplary variant proteins that are modified to generate additional CasX variants of the disclosure having improvements or additional properties relative to a reference CasX or CasX variants from which they were derived. CasX 119 contains a substitution of L379R, a substitution of A708K and a deletion of P at position 793 of SEQ ID NO: 2. CasX 491 contains NTSB and Helical 1B swap from SEQ ID NO: 1. CasX 515 was derived from CasX 491 by insertion of P at position 793 (relative to SEQ ID NO:2) and was used to create the CasX variants described in Examples 13 and 14. For example, CasX 668 has an insertion of R at position 26 and a substitution of G223S relative to CasX 515. CasX 672 has substitutions of L169K and G223S relative to CasX 515. CasX 676 has substitutions of L169K and G223S and an insertion of R at position 26 relative to CasX 515.

[0230] Exemplary methods used to generate and evaluate CasX variants derived from other CasX variants are described in the Examples, which were created by introducing modifications to the encoding sequence resulting in amino acid substitutions, deletions, or insertions at one or more positions in one or more domains of the CasX variant. In particular, Example 14 and Example 15 describe the methods used to create variants of CasX 515 (SEQ ID NO: 416) that were then assayed to determine those positions in the sequence that, when modified by an amino acid insertion, deletion or substitution, resulted in an enrichment or improvement in the assays. In some cases, the results of the assays were used to generate the heat maps of FIGS. 34-36, which provide qualitative and quantitative data at a given amino acid position modified by the methods. For purposes of the disclosure, the sequences of the domains of CasX 515 are provided in Table 4 and include an OBD-I domain having the sequence of SEQ ID NO: 2342, an OBD-II domain having the sequence of SEQ ID NO: 2347, NTSB domain having the sequence of SEQ ID NO: 2335, a helical I-I domain having the sequence of SEQ ID NO: 2343, a helical I-II domain having the sequence of SEQ ID NO: 2336, a helical II domain having the sequence of SEQ ID NO: 2351, a RuvC-I domain having the sequence of SEQ ID NO: 2352, a RuvC-II domain having the sequence of SEQ ID NO: 2350, and a TSL domain having the sequence of SEQ ID NO: 2349. By the methods of the disclosure, individual positions in the domains of CasX 515 were modified, assayed, and the resulting positions and exemplary modifications leading to an enrichment or improvement that follow are provided, relative to their position in each domain or subdomain. In some cases, such positions are disclosed in Tables 21-24 of the Examples. In some embodiments, the disclosure provides CasX variants derived from CasX 515 comprising one or more modifications (i.e., an insertion, a deletion, or a substitution) at one or more amino acid positions in the NTSB domain relative to SEQ ID NO: 2335 selected from the group consisting of P2, S4, Q9, E15, G20, G33, L41, Y51, F55, L68, A70, E75, K88, and G90, wherein the modification results in an improved characteristic relative to CasX 515. In a particular embodiment, the one or more modifications at one or more amino acid positions in the NTSB domain relative to SEQ ID NO: 2335 are selected from the group consisting of ∧G2, ∧I4, ∧L4, Q9P, E15S, G20D, [S30], G33T, L41A, Y51T, F55V, L68D, L68E, L68K, A70Y, A70S, E75A, E75D, E75P, K88Q, and G90Q (where “∧” represents and insertion and “[ ]” represents a deletion at that position). In some embodiments, the disclosure provides CasX variants derived from CasX 515 comprising one or more modifications at one or more amino acid positions in the helical I-II domain relative to SEQ ID NO: 2336 selected from the group consisting of 124, A25, Y29 G32, G44, S48, S51, Q54, 156, V63, S73, L74, K97, V100, M112, L116, G137, F138, and S140, wherein the modification results in an improved characteristic relative to CasX 515. In a particular embodiment, the one or more modifications at one or more amino acid positions in the helical I-II domain are selected from the group consisting of ∧T24, ∧C25, Y29F,G32Y, G32N, G32H, G32S, G32T, G32A, G32V, [G32], G32S, G32T, G44L, G44H, S48H, S48T, S51T, Q54H, I56T, V63T, S73H, L74Y, K97G, K97S, K97D, K97E, V100L, M112T, M112W, M112R, M112K, L116K, G137R, G137K, G137N, ∧Q138, and S140Q. In some embodiments, the disclosure provides CasX variants derived from CasX 515 comprising one or more modifications at one or more amino acid positions in the helical II domain relative to SEQ ID NO: 2351 selected from the group consisting of L2, V3, E4, R5, Q6, A7, E9, V10, D11, W12, W13, D14, M15, V16, C17, N18, V19, K₂O, L22, 123, E25, K26, K31, Q35, L37, A38, K41,R 42, Q43, E44, L46, K57, Y65, G68, L70, L71, L72, E75, G79, D81, W82, K84, V85, Y86, D87, 193, K95, K96, E98, L100, K102, 1104, K105, E109, R110, D114, K118, A120, L121, W124, L125, R126, A127, A129, 1133, E134, G135, L136, E138, D140, K141, D142, E143, F144, C145, C147, E148, L149, K150, L151, Q152, K153, L158, E166, and A167, wherein the modification results in an improved characteristic relative to CasX 515. In a particular embodiment, the one or more modifications at one or more amino acid positions in the helical II domain are selected from the group consisting of ∧A2, ∧H2, [L2]+[V3], V3E, V3Q, V3F, [V3], ∧D3, V3P, E4P, [E4], E4D, E4L, E4R, R5N, Q6V, ∧Q6, ∧G7, ∧H9, ∧A9, VD10, ∧T10, [V10], ∧F10, ∧D1I, [D11], D11S, [W12], W12T, W12H, ∧P12, ∧Q13, ∧G12, ∧R13, W13P, W13D, ∧D13, W13L, ∧P14, ∧D14, [D14]+[M15], [M15], ∧T16, ∧P17, N18I, V19N, V19H, K20D, L22D, I23S, E25C, E25P, ∧G25, K26T, K27E, K31L, K31Y, Q35D, Q35P, ∧S37, [L37]+[A38], K41L, ∧R42, [Q43]+[E44], L46N, K57Q, Y65T, G68M, L70V, L71C, L72D, L72N, L72W, L72Y, E75F, E75L, E75Y, G79P, ∧E79, ∧T81, ∧R81, ∧W81, ∧Y81, ∧W82, ∧Y82, W82G, W82R, K84D, K84H, K84P, K84T, V85L, V85A, ∧L85, Y86C, D87G, D87M, D87P, I93C, K95T, K96R, E98G, L100A, K102H, I104T, I104S, I104Q, K105D, ∧K109, E109L, R110D, [R110], D114E, ∧D114, K118P, A120R, L121T, W124L, L125C, R126D, A127E, A127L, A129T, A129K, 1133E, ∧C133, ∧S134, ∧G134, ∧R135, G135P, L136K, L136D, L136S, L136H, [E138], D140R, ∧D140, ∧P141, ∧D142, [E143]+[F144], ∧Q143, F144K, [F144], [F144]+[C145], C145R, ∧G145, C145K, C147D, ∧V148, E148D, ∧H149, L149R, K150R, L151H, Q152C, K153P, L158S, E166L, and ∧F167. In some embodiments, the disclosure provides CasX variants derived from CasX 515 comprising one or more modifications at one or more amino acid positions in the RuvC-I domain relative to SEQ ID NO: 2352 selected from the group consisting of 14, K5, P6, M7, N8, L9, V12, G49, K63, K80, N83, R90, M125, and L146, wherein the modification results in an improved characteristic relative to CasX 515. In a particular embodiment, the one or more modifications at one or more amino acid positions in the RuvC-I domain are selected from the group consisting of ∧I4, ∧S5, ∧T6, ∧N6, ∧R7, ∧K7, ∧H8, ∧S8, V12L, G49W, G49R, S51R, S51K, K62S, K62T, K62E, V65A, K80E, N83G, R90H, R90G, M125S, M125A, L137Y, ∧P137, [L141], L141R, L141D, ∧Q142, ∧R143, ∧N143, E144N, ∧P146, L146F, P147A, K149Q, T150V, ∧R152, ∧H153, T155Q, ∧H155, ∧R155, ∧L156, [L156], ∧W156, ∧A157, ∧F157, A157S, Q158K, [Y159], T160Y, T160F, A1161, S161P, T163P, ∧N163, C164K, and C164M. In some embodiments, the disclosure provides CasX variants derived from CasX 515 comprising one or more modifications at one or more amino acid positions in the OBD-I domain relative to SEQ ID NO: 2342 selected from the group consisting of 14, K5, P6, M7, N8, L9, V12, G49, K63, K80, N83, R90, M125, and L146, wherein the modification results in an improved characteristic relative to CasX 515. In a particular embodiment, the one or more modifications at one or more amino acid positions in the OBD-I domain are selected from the group consisting of ∧G3, I3G, 3E, ∧G4, K4G, K4P, K4S, K4W, K4W, R5P, ∧P5, ∧G5, R5S, ∧S5, R5A, R5P, R5G, R5L, I6A, 6L, ∧G6, N7Q, N7L, N7S, K8G, K15F, D16W, ∧F16, ∧F18, ∧P27, M28P, M28H, V33T, R34P, M36Y, R41P, L47P, ∧P48, E52P, ∧P55, [P55]+[Q56], Q56S, Q56P, ∧D56, ∧T56, and Q56P. In some embodiments, the disclosure provides CasX variants derived from CasX 515 comprising one or more modifications at one or more amino acid positions in the OBD-II domain relative to SEQ ID NO: 2347 selected from the group consisting of 14, K5, P6, M7, N8, L9, V12, G49, K63, K80, N83, R90, M125, and L146, wherein the modification results in an improved characteristic relative to CasX 515. In a particular embodiment, the one or more modifications at one or more amino acid positions in the OBD-I domain are selected from the group consisting of [S2], 13R, I3K, [I3]+[L4], [L4], K11T, ∧P24, K37G, R42E, ∧S53, ∧R58, [K63], M70T, I82T, Q92I, Q92F, Q92V, Q92A, ∧A93, K110Q, R115Q, L121T, ∧A124, ∧R141, ∧D143, ∧A143, ∧W144, and ∧A145. In some embodiments, the disclosure provides CasX variants derived from CasX 515 comprising one or more modifications at one or more amino acid positions in the TSL domain relative to SEQ ID NO: 2349 selected from the group consisting of S1, N2, C3, G4, F5, 17, K18, V58, S67, T76, G78, S80, G81, E82, S85, V96, and E98, wherein the modification results in an improved characteristic relative to CasX 515. In a particular embodiment, the one or more modifications at one or more amino acid positions in the OBD-I domain are selected from the group consisting of ∧M1, [N2], ∧V2, C3S, ∧G4, ∧W4, F5P, ∧W7, K18G, V58D, ∧A67, T76E, T76D, T76N, G78D, [S80], [G81], ∧E82, ∧N82, S85I, V96C, V96T, and E98D. It will be understood that combinations of any of the same foregoing modifications of the paragraph can similarly be introduced into the CasX variants of the disclosure, resulting in a CasX variant with improved characteristics. For example, in one embodiment, the disclosure provides CasX variant 535 (SEQ ID NO: 435), which has a single mutation of G223S relative to CasX 515. In another embodiment, the disclosure provides CasX variant 668 (SEQ ID NO: 567), which has an insertion of R at position 26 and a substitution of G223S relative to CasX 515. In another embodiment, the disclosure provides CasX 672 (SEQ ID NO:570), which has substitutions of L169K and G223S relative to CasX 515. In another embodiment, the disclosure provides CasX 676 (SEQ ID NO: 574), which has substitutions of L169K and G223S and an insertion of R at position 26 relative to CasX 515. CasX variants with improved characteristics relative to CasX 515 include variants of Table 3.

[0231] Exemplary characteristics that can be improved in CasX variant proteins relative to the same characteristics in reference CasX proteins or relative to the CasX variant from which they were derived include, but are not limited to improved folding of the variant, increased binding affinity to the gRNA, increased binding affinity to the target nucleic acid, improved ability to utilize a greater spectrum of PAM sequences in the editing and/or binding of target nucleic acid, improved unwinding of the target DNA, increased editing activity, improved editing efficiency, improved editing specificity for the target nucleic acid, decreased off-target editing or cleavage, increased percentage of a eukaryotic genome that can be efficiently edited, increased activity of the nuclease, increased target strand loading for double strand cleavage, decreased target strand loading for single strand nicking, increased binding of the non-target strand of DNA, improved protein stability, improved protein:gRNA (RNP) complex stability, and improved fusion characteristics. In a particular embodiment, as described in the Examples, such improved characterisitics can include, but are not limited to, improved cleavage activity in target nucleic acids having TTC, ATC, and CTC PAM sequences, increased specificity for cleavage of a target nucleic acid sequence, and decreased off-target cleavage of a target nucleic acid.

TABLE 6
CasX 515 domain sequences

| | SEQ | |
|---|---|---|
| | ID | |
| Domain | NO | Amino Acid Sequence |
| ODB-I | 2342 | QEIKRINKIRRRLVKDSNTKKAGKTGPMKTLLVRVMT |
| | | PDLRERLENLRKKPENIPQ |
| Helical | 2343 | PISNTSRANLNKLLTDYTEMKKAILHVYWEEFQKDPV |
| I-I | | GLMSRVA |
| NTSB | 2335 | QPASKKIDQNKLKPEMDEKGNLTTAGFACSQCGQPLF |
| | | VYKLEQVSEKGKAYTNYFGRCNVAEHEKLILLAQLKP |
| | | EKDSDEAVTYSLGKFGQ |
| Helical | 2336 | RALDFYSIHVTKESTHPVKPLAQIAGNRYASGPVGKA |
| I-II | | LSDACMGTIASFLSKYQDIIIEHQKVVKGNQKRLESL |
| | | RELAGKENLEYPSVTLPPQPHTKEGVDAYNEVIARVR |
| | | MWVNLNLWQKLKLSRDDAKPLLRLKGFPSF |
| Helical | 2351 | PLVERQANEVDWWDMVCNVKKLINEKKEDGKVFWQNL |
| II | | AGYKRQEALRPYLSSEEDRKKGKKFARYQLGDLLLHL |
| | | EKKHGEDWGKVYDEAWERIDKKVEGLSKHIKLEEERR |
| | | SEDAQSKAALTDWLRAKASFVIEGLKEADKDEFCRCE |
| | | LKLQKWYGDLRGKPFAIEAE |
| OBD-II | 2347 | NSILDISGFSKQYNCAFIWQKDGVKKLNLYLIINYFK |
| | | GGKLRFKKIKPEAFEANRFYTVINKKSGEIVPMEVNF |
| | | NFDDPNLIILPLAFGKRQGREFIWNDLLSLETGSLKL |
| | | ANGRVIEKTLYNRRTRQDEPALFVALTFERREVLD |
| RuvC-I | 2352 | SSNIKPMNLIGVDRGENIPAVIALTDPEGCPLSRFKD |
| | | SLGNPTHILRIGESYKEKQRTIQAKKEVEQRRAGGYS |
| | | RKYASKAKNLADDMVRNTARDLLYYAVTQDAMLIFEN |
| | | LSRGFGRQGKRTFMAERQYTRMEDWLTAKLAYEGLPS |
| | | KTYLSKTLAQYTSKTC |
| TSL | 2349 | SNCGFTITSADYDRVLEKLKKTATGWMTTINGKELKV |
| | | EGQITYYNRYKRQNVVKDLSVELDRLSEESVNNDISS |
| | | WTKGRSGEALSLLKKRFSHRPVQEKFVCLNCGFETH |
| RuvC-II | 2350 | ADEQAALNIARSWLFLRSQEYKKYQTNKTTGNTDKRA |
| | | FVETWQSFYRKKLKEVWKPAV |

[0232] The CasX variants of the embodiments described herein have the ability to form an RNP complex with the gRNA disclosed herein. In some embodiments, an RNP comprising the CasX variant protein and a gRNA of the disclosure, at a concentration of 20 pM or less, is capable of cleaving a double stranded DNA target with an efficiency of at least 80%. In some embodiments, the RNP at a concentration of 20 pM or less is capable of cleaving a double stranded DNA target with an efficiency of at least 40%, at least 50%, at least 60%, at least 70%, at least 80%, at least 85%, at least 90% or at least 95%. In some embodiments, the RNP at a concentration of 50 pM or less, 40 pM or less, 30 pM or less, 20 pM or less, 10 pM or less, or 5 pM or less, is capable of cleaving a double stranded DNA target with an efficiency of at least 40%, at least 50%, at least 60%, at least 70%, at least 80%, at least 85%, at least 90% or at least 95%. These improved characteristics are described in more detail, below.

g. Protein Stability

[0233] In some embodiments, the disclosure provides a CasX variant protein with improved stability relative to a reference CasX protein. In some embodiments, improved stability of the CasX variant protein results in expression of a higher steady state of protein, which improves editing efficiency. In some embodiments, improved stability of the CasX variant protein results in a larger fraction of CasX protein that remains folded in a functional conformation and improves editing efficiency or improves purifiability for manufacturing purposes. As used herein, a “functional conformation” refers to a CasX protein that is in a conformation where the protein is capable of binding a gRNA and target nucleic acid. In embodiments wherein the CasX variant does not carry one or more mutations rendering it catalytically-dead, the CasX variant is capable of cleaving, nicking, or otherwise modifying the target nucleic acid when complexed with the gRNA with a targeting sequence capable of hybridizing with the target nucleic acid. A functional conformation of a CasX refers to an “cleavagecompetent” conformation. In some exemplary embodiments, including those embodiments where the CasX variant protein results in a larger fraction of CasX protein that remains folded in a functional conformation, a lower concentration of CasX variant is needed for applications such as gene editing compared to a reference CasX protein. Thus, in some embodiments, the CasX variant with improved stability has improved efficiency compared to a reference CasX in one or more gene editing contexts.

[0234] In some embodiments, the disclosure provides a CasX variant protein having improved stability of the CasX variant protein:gRNA RNP complex relative to the reference CasX protein:gRNA complex such that the RNP remains in a functional form. Stability improvements can include increased thermostability, resistance to proteolytic degradation, enhanced pharmacokinetic properties, stability across a range of pH conditions, salt conditions, and tonicity. Improved stability of the complex may, in some embodiments, lead to improved editing efficiency. In some embodiments, the RNP of the CasX variant and gRNA variant has at least a 2-fold, at least a 3-fold, or at least a 4-fold higher percentage of cleavage-competent RNP compared to an RNP of the reference CasX of SEQ ID NOS: 1-3 and the gRNA of SEQ ID NOS:4 or 5 of Table 1. Exemplary data of increased cleavage-competent RNP are provided in the Examples.

[0235] In some embodiments, improved stability of the CasX variant protein comprises improved folding kinetics of the CasX variant protein relative to a reference CasX protein. In some embodiments, folding kinetics of the CasX variant protein are improved relative to a reference CasX protein by at least about 5, at least about 10, at least about 50, at least about 100, at least about 500, at least about 1,000, at least about 2,000, at least about 3,000, at least about 4,000, at least about 5,000, or at least about a 10,000-fold improvement. In some embodiments, folding kinetics of the CasX variant protein are improved relative to a reference CasX protein by at least about 1 kJ/mol, at least about 5 kJ/mol, at least about 10 kJ/mol, at least about 20 kJ/mol, at least about 30 kJ/mol, at least about 40 kJ/mol, at least about 50 kJ/mol, at least about 60 kJ/mol, at least about 70 kJ/mol, at least about 80 kJ/mol, at least about 90 kJ/mol, at least about 100 kJ/mol, at least about 150 kJ/mol, at least about 200 kJ/mol, at least about 250 kJ/mol, at least about 300 kJ/mol, at least about 350 kJ/mol, at least about 400 kJ/mol, at least about 450 kJ/mol, or at least about 500 kJ/mol.

[0236] Exemplary amino acid changes that can increase the stability of a CasX variant protein relative to a reference CasX protein may include, but are not limited to, amino acid changes that increase the number of hydrogen bonds within the CasX variant protein, increase the number of disulfide bridges within the CasX variant protein, increase the number of salt bridges within the CasX variant protein, strengthen interactions between parts of the CasX variant protein, increase the buried hydrophobic surface area of the CasX variant protein, or any combinations thereof.

h. Protein Affinity for the gRNA

[0237] In some embodiments, a CasX variant protein has improved affinity for the gRNA relative to a reference CasX protein, or to another CasX variant from which it was derived, leading to the formation of the ribonucleoprotein complex. Increased affinity of the CasX variant protein for the gRNA may, for example, result in a lower K_{d} for the generation of an RNP complex, which can, in some cases, result in a more stable RNP complex formation. In some embodiments, increased affinity of the CasX variant protein for the gRNA results in increased stability of the RNP complex when delivered to human cells. This increased stability can affect the function and utility of the complex in the cells of a subject, as well as result in improved pharmacokinetic properties in blood, when delivered to a subject. In some embodiments, increased affinity of the CasX variant protein, and the resulting increased stability of the RNP complex, allows for a lower dose of the CasX variant protein to be delivered to the subject or cells while still having the desired activity, for example in vivo or in vitro gene editing.

[0238] In some embodiments, a higher affinity (tighter binding) of a CasX variant protein to a gRNA allows for a greater amount of editing events when both the CasX variant protein and the gRNA remain in an RNP complex. Increased editing events can be assessed using editing assays described herein.

[0239] In some embodiments, the K_{d} of a CasX variant protein for a gRNA is increased relative to a reference CasX protein, or to another CasX variant from which it was derived, by a factor of at least about 1.1, at least about 1.2, at least about 1.3, at least about 1.4, at least about 1.5, at least about 1.6, at least about 1.7, at least about 1.8, at least about 1.9, at least about 2, at least about 3, at least about 4, at least about 5, at least about 6, at least about 7, at least about 8, at least about 9, at least about 10, at least about 15, at least about 20, at least about 25, at least about 30, at least about 35, at least about 40, at least about 45, at least about 50, at least about 60, at least about 70, at least about 80, at least about 90, or at least about 100. In some embodiments, the CasX variant has about 1.1 to about 10-fold increased binding affinity to the gRNA compared to the reference CasX protein of SEQ ID NO: 2.

[0240] Without wishing to be bound by theory, in some embodiments amino acid changes in the helical I domain can increase the binding affinity of the CasX variant protein with the gRNA targeting sequence, while changes in the helical II domain can increase the binding affinity of the CasX variant protein with the gRNA scaffold stem loop, and changes in the oligonucleotide binding domain (OBD) increase the binding affinity of the CasX variant protein with the gRNA triplex.

[0241] Methods of measuring CasX protein binding affinity for a gRNA include in vitro methods using purified CasX protein and gRNA. The binding affinity for reference CasX and variant proteins can be measured by fluorescence polarization if the gRNA or CasX protein is tagged with a fluorophore. Alternatively, or in addition, binding affinity can be measured by biolayer interferometry, electrophoretic mobility shift assays (EMSAs), or filter binding. Additional standard techniques to quantify absolute affinities of RNA binding proteins such as the reference CasX and variant proteins of the disclosure for specific gRNAs such as reference gRNAs and variants thereof include, but are not limited to, isothermal calorimetry (ITC), and surface plasmon resonance (SPR), as well as the methods of the Examples.

i. Affinity for Target Nucleic Acid

[0242] In some embodiments, a CasX variant protein has increased binding affinity for a target nucleic acid relative to the affinity of a reference CasX protein for a target nucleic acid, or to another CasX variant from which it was derived. CasX variants with higher affinity for their target nucleic acid may, in some embodiments, cleave the target nucleic acid sequence more rapidly than a reference CasX protein that does not have increased affinity for the target nucleic acid.

[0243] In some embodiments, the improved affinity for the target nucleic acid comprises improved affinity for the target sequence or protospacer sequence of the target nucleic acid, improved affinity for the PAM sequence, an improved ability to search DNA for the target sequence, or any combinations thereof. Without wishing to be bound by theory, it is thought that CRISPR/Cas system proteins such as CasX may find their target sequences by one-dimension diffusion along a DNA molecule. The process is thought to include (1) binding of the ribonucleoprotein to the DNA molecule followed by (2) stalling at the target sequence, either of which may be, in some embodiments, affected by improved affinity of CasX proteins for a target nucleic acid sequence, thereby improving function of the CasX variant protein compared to a reference CasX protein.

[0244] In some embodiments, a CasX variant protein with improved target nucleic acid affinity has increased affinity for or the ability to utilize specific PAM sequences other than the canonical TTC PAM recognized by the reference CasX protein of SEQ ID NO: 2, including PAM sequences selected from the group consisting of TTC, ATC, GTC, and CTC, thereby increasing the amount of target nucleic acid that can be edited compared to wild-type CasX nucleases or the nucleases of CasX 199 or 491. Without wishing to be bound by theory, it is possible that these protein variants may interact more strongly with DNA overall and may have an increased ability to access and edit sequences within the target nucleic acid due to the ability to utilize additional PAM sequences beyond those of wild-type reference CasX or the nucleases of CasX 199 or 491, thereby allowing for a more efficient search process of the CasX protein for the target sequence. A higher overall affinity for DNA also, in some embodiments, can increase the frequency at which a CasX protein can effectively start and finish a binding and unwinding step, thereby facilitating target strand invasion and R-loop formation, and ultimately the cleavage of a target nucleic acid sequence.

[0245] Without wishing to be bound by theory, it is possible that amino acid changes in the NTSB domain that increase the efficiency of unwinding, or capture, of a non-target nucleic acid strand in the unwound state, can increase the affinity of CasX variant proteins for target nucleic acid. Alternatively, or in addition, amino acid changes in the NTSB domain that increase the ability of the NTSB domain to stabilize DNA during unwinding can increase the affinity of CasX variant proteins for target nucleic acid. Alternatively, or in addition, amino acid changes in the OBD may increase the affinity of CasX variant protein binding to the protospacer adjacent motif (PAM), thereby increasing affinity of the CasX variant protein for target nucleic acid. Alternatively, or in addition, amino acid changes in the Helical I and/or II, RuvC and TSL domains that increase the affinity of the CasX variant protein for the target nucleic acid strand can increase the affinity of the CasX variant protein for target nucleic acid.

[0246] In some embodiments, binding affinity of a CasX variant protein of the disclosure for a target nucleic acid molecule is increased relative to a reference CasX protein, or to another CasX variant from which it was derived, by a factor of at least about 1.1, at least about 1.2, at least about 1.3, at least about 1.4, at least about 1.5, at least about 1.6, at least about 1.7, at least about 1.8, at least about 1.9, at least about 2, at least about 3, at least about 4, at least about 5, at least about 6, at least about 7, at least about 8, at least about 9, at least about 10, at least about 15, at least about 20, at least about 25, at least about 30, at least about 35, at least about 40, at least about 45, at least about 50, at least about 60, at least about 70, at least about 80, at least about 90, or at least about 100. In some embodiments, the CasX variant protein has about 1.1 to about 100-fold increased binding affinity to the target nucleic acid compared to the reference protein of SEQ ID NO: 1, SEQ ID NO: 2, or SEQ ID NO: 3, or to the CasX 491 and 515 variants.

[0247] In some embodiments, a CasX variant protein has increased binding affinity for the non-target strand of the target nucleic acid. As used herein, the term “non-target strand” refers to the strand of the DNA target nucleic acid sequence that does not form Watson and Crick base pairs with the targeting sequence in the gRNA, and is complementary to the target nucleic acid strand. In some embodiments, the CasX variant protein has about 1.1 to about 100-fold increased binding affinity to the non-target stand of the target nucleic acid compared to the reference protein of SEQ ID NO: 1, SEQ ID NO: 2, or SEQ ID NO: 3, or to the CasX variants of SEQ ID NO: 270, or SEQ ID NO: 336.

[0248] Methods of measuring CasX protein (such as reference or variant) affinity for a target and/or non-target nucleic acid molecule may include electrophoretic mobility shift assays (EMSAs), filter binding, isothermal calorimetry (ITC), and surface plasmon resonance (SPR), fluorescence polarization and biolayer interferometry (BLI). Further methods of measuring CasX protein affinity for a target include in vitro biochemical assays that measure DNA cleavage events over time.

j. Improved Specificity for a Target Site

[0249] In some embodiments, a CasX variant protein has improved specificity for a target nucleic acid sequence relative to a reference CasX protein, or to another CasX variant from which it was derived. As used herein, “specificity,” sometimes referred to as “target specificity,” refers to the degree to which a CRISPR/Cas system ribonucleoprotein complex cleaves off-target sequences that are similar, but not identical to the target nucleic acid sequence; e.g., a CasX variant RNP with a higher degree of specificity would exhibit reduced off-target cleavage of sequences relative to a reference CasX protein. The specificity, and the reduction of potentially deleterious off-target effects, of CRISPR/Cas system proteins can be vitally important in order to achieve an acceptable therapeutic index for use in mammalian subjects.

[0250] In some embodiments, a CasX variant protein has improved specificity for a target site within the target sequence that is complementary to the targeting sequence of the gRNA. As described, supra, correlate to improved specificity is reduced off-target editing. In some embodiments, a CasX variant protein exhibits reduced off-target editing or cleavage for a target site within the target sequence that is not 100% complementary to the targeting sequence of the gRNA complexed with the CasX variant as an RNP. Without wishing to be bound by theory, it is possible that amino acid changes in the helical I and II domains that increase the specificity of the CasX variant protein for the target nucleic acid strand can increase the specificity of the CasX variant protein for the target nucleic acid overall. In some embodiments, amino acid changes that increase specificity of CasX variant proteins for target nucleic acid may also result in decreased affinity of CasX variant proteins for DNA.

[0251] Methods of testing CasX protein (such as variant or reference) target specificity may include guide and Circularization for In vitro Reporting of Cleavage Effects by Sequencing (CIRCLE-seq), or similar methods. In brief, in CIRCLE-seq techniques, genomic DNA is sheared and circularized by ligation of stem-loop adapters, which are nicked in the stem-loop regions to expose 4 nucleotide palindromic overhangs. This is followed by intramolecular ligation and degradation of remaining linear DNA. Circular DNA molecules containing a CasX cleavage site are subsequently linearized with CasX, and adapter adapters are ligated to the exposed ends followed by high-throughput sequencing to generate paired end reads that contain information about the off-target site. Additional assays that can be used to detect off-target events, and therefore CasX protein specificity include assays used to detect and quantify indels (insertions and deletions) formed at those selected off-target sites such as mismatch-detection nuclease assays and next generation sequencing (NGS). Exemplary mismatch-detection assays include nuclease assays, in which genomic DNA from cells treated with CasX and sgRNA is PCR amplified, denatured and rehybridized to form hetero-duplex DNA, containing one wild-type strand and one strand with an indel. Mismatches are recognized and cleaved by mismatch detection nucleases, such as Surveyor nuclease or T7 endonuclease I. Methods to evaluate the specificity of the CasX variants, along with supporting data demonstrating improved specificity of embodiments of CasX variants, are described in the Examples.

k. Protospacer and PAM Sequences

[0252] Herein, the protospacer is defined as the DNA sequence complementary to the targeting sequence of the guide RNA and the DNA complementary to that sequence, referred to as the target strand and non-target strand, respectively. As used herein, the PAM is a nucleotide sequence proximal to the protospacer that, in conjunction with the targeting sequence of the gRNA, helps the orientation and positioning of the CasX for the potential cleavage of the protospacer strand(s).

[0253] PAM sequences may be degenerate, and specific RNP constructs may have different preferred and tolerated PAM sequences that support different efficiencies of cleavage. Following convention, unless stated otherwise, the disclosure refers to both the PAM and the protospacer sequence and their directionality according to the orientation of the non-target strand. This does not imply that the PAM sequence of the non-target strand, rather than the target strand, is determinative of cleavage or mechanistically involved in target recognition. For example, when reference is to a TTC PAM, it may in fact be the complementary GAA sequence that is required for target cleavage, or it may be some combination of nucleotides from both strands. In the case of the CasX proteins disclosed herein, the PAM is located 5′ of the protospacer with a single nucleotide separating the PAM from the first nucleotide of the protospacer. Thus, in the case of reference CasX, a TTC PAM should be understood to mean a sequence following the formula 5′- . . . NNTTCN(protospacer)NNNNNN. . . 3′ (SEQ ID NO: 19) where ‘N’ is any DNA nucleotide and ‘(protospacer)’ is a DNA sequence having identity with the targeting sequence of the guide RNA. In the case of a CasX variant with expanded PAM recognition, a TTC, CTC, GTC, or ATC PAM should be understood to mean a sequence following the formulae: 5′-
[0254] . . . NNTTCN(protospacer)NNNNNN. . . 3′ (SEQ ID NO: 19); 5′-
[0255] . . . NNCTCN(protospacer)NNNNNN. . . 3′ (SEQ ID NO: 20); 5′-
[0256] . . . NNGTCN(protospacer)NNNNNN. . . 3′ (SEQ ID NO: 21); or 5′-
[0257] . . . NNATCN(protospacer)NNNNNN. . . 3′ (SEQ ID NO: 22). Alternatively, a TC PAM should be understood to mean a sequence following the formula 5′-
[0258] . . . NNNTCN(protospacer)NNNNNN. . . 3′ (SEQ ID NO: 23).

[0259] Additionally, the CasX variant proteins of the disclosure have an enhanced ability to efficiently edit and/or bind target nucleic acid, when complexed with a gRNA as an RNP, utilizing a PAM TC motif, including PAM sequences selected from TTC, ATC, GTC, or CTC, (in a 5′ to 3′ orientation), compared to an RNP of a reference CasX protein and reference gRNA, or to an RNP of another CasX variant from which it was derived, such as CasX 491, and gRNA 174. In the foregoing, the PAM sequence is located at least 1 nucleotide 5′ to the non-target strand of the protospacer having identity with the targeting sequence of the gRNA in an assay system compared to the editing efficiency and/or binding of an RNP comprising a reference CasX protein and reference gRNA in a comparable assay system. In one embodiment, an RNP of a CasX variant and gRNA variant exhibits greater editing efficiency and/or binding of a target sequence in the target nucleic acid compared to an RNP comprising a reference CasX protein and a reference gRNA (or an RNP of another CasX variant from which it was derived, such as CasX 491, and gRNA 174) in a comparable assay system, wherein the PAM sequence of the target DNA is TTC. In another embodiment, an RNP of a CasX variant and gRNA variant exhibits greater editing efficiency and/or binding of a target sequence in the target nucleic acid compared to an RNP comprising a reference CasX protein and a reference gRNA (or an RNP of another CasX variant from which it was derived, such as CasX 491 and gRNA 174) in a comparable assay system, wherein the PAM sequence of the target DNA is ATC. In a particular embodiment of the foregoing, wherein the CasX variant exhibits enhanced editing with an ATC PAM, the CasX variant is 528 (SEQ ID NO: 428). In another embodiment, an RNP of a CasX variant and gRNA variant exhibits greater editing efficiency and/or binding of a target sequence in the target nucleic acid compared to an RNP comprising a reference CasX protein and a reference gRNA (or an RNP of another CasX variant from which it was derived, such as CasX 491, and gRNA 174) in a comparable assay system, wherein the PAM sequence of the target DNA is CTC. In another embodiment, an RNP of a CasX variant and gRNA variant exhibits greater editing efficiency and/or binding of a target sequence in the target nucleic acid compared to an RNP comprising a reference CasX protein and a reference gRNA (or an RNP of another CasX variant from which it was derived and gRNA 174) in a comparable assay system, wherein the PAM sequence of the target DNA is GTC. In the foregoing embodiments, the increased editing efficiency and/or binding affinity for the one or more PAM sequences is at least 1.5-fold, at least 2-fold, at least 4-fold, at least 10-fold, at least 20-fold, at least 30-fold, or at least 40-fold greater or more compared to the editing efficiency and/or binding affinity of an RNP of any one of the CasX proteins of SEQ ID NOS: 1-3 and the gRNA of Table 1 for the PAM sequences. Exemplary assays demonstrating the improved editing are described herein, in the Examples (see, e.g., FIG. 41). In some embodiments, a CasX protein can bind and/or modify (e.g., cleave, nick, methylate, demethylate, etc.) a target nucleic acid and/or a polypeptide associated with target nucleic acid (e.g., methylation or acetylation of a histone tail). In some embodiments, the CasX protein is catalytically-dead (dCasX) but retains the ability to bind a target nucleic acid.

l. Unwinding of DNA

[0260] In some embodiments, a CasX variant protein has improved ability to unwind DNA relative to a reference CasX protein. Poor dsDNA unwinding has been shown previously to impair or prevent the ability of CRISPR/Cas system proteins AnaCas9 or Cas14s to cleave DNA. Therefore, without wishing to be bound by any theory, it is likely that increased DNA cleavage activity by some CasX variant proteins of the disclosure is due, at least in part, to an increased ability to find and unwind the dsDNA at a target site. Methods of measuring the ability of CasX proteins (such as variant or reference) to unwind DNA include, but are not limited to, in vitro assays that observe increased on rates of dsDNA targets in fluorescence polarization or biolayer interferometry.

[0261] Without wishing to be bound by theory, it is thought that amino acid changes in the NTSB domain may produce CasX variant proteins with increased DNA unwinding characteristics. Alternatively, or in addition, amino acid changes in the OBD or the helical domain regions that interact with the PAM may also produce CasX variant proteins with increased DNA unwinding characteristics.

[0262] Methods of measuring the ability of CasX proteins (such as variant or reference) to unwind DNA include, but are not limited to, in vitro assays that observe increased on rates of dsDNA targets in fluorescence polarization or biolayer interferometry.

m. Catalytic Activity

[0263] The ribonucleoprotein complex of the CasX:gRNA systems disclosed herein comprise a CasX variant complexed with a gRNA varaint that binds to a target nucleic acid and, in some cases, cleaves the target nucleic acid. In some embodiments, a CasX variant protein has improved catalytic activity relative to a reference CasX protein, or to another CasX variant from which it was derived. Without wishing to be bound by theory, it is thought that in some cases cleavage of the target strand can be a limiting factor for Cas12-like molecules in creating a dsDNA break. In some embodiments, CasX variant proteins improve bending of the target strand of DNA and cleavage of this strand, resulting in an improvement in the overall efficiency of dsDNA cleavage by the CasX ribonucleoprotein complex.

[0264] In some embodiments, a CasX variant protein has increased nuclease activity compared to a reference CasX protein, or to another CasX variant from which it was derived. Variants with increased nuclease activity can be generated, for example, through amino acid changes in the RuvC nuclease domain. In some embodiments, the CasX variant comprises a RuvC nuclease domain having nickase activity. In the foregoing, the CasX nickase of a CasX:gRNA system generates a single-stranded break within 10-18 nucleotides 3′ of a PAM site in the non-target strand. In other embodiments, the CasX variant comprises a RuvC nuclease domain having double-stranded cleavage activity. In the foregoing, the CasX of the CasX:gRNA system generates a double-stranded break within 18-26 nucleotides 5′ of a PAM site on the target strand and 10-18 nucleotides 3′ on the non-target strand. Nuclease activity can be assayed by a variety of methods, including those of the Examples. In some embodiments, a CasX variant has a k_{cleave} constant that is at least 2-fold, or at least 3-fold, or at least 4-fold, or at least 5-fold, or at least 6-fold, or at least 7-fold, or at least 8-fold, or at least 9-fold, or at least 10-fold greater compared to a reference CasX.

[0265] In some embodiments, a CasX variant protein has the improved characteristic of forming RNP with gRNA that result in a higher percentage of cleavage-competent RNP compared to an RNP of a reference CasX protein of SEQ ID NO: 1, SEQ ID NO: 2, or SEQ ID NO: 3 and the gRNA, as described in the Examples. By cleavage competent, it is meant that the RNP that is formed has the ability to cleave the target nucleic acid. In some embodiments, the RNP of the CasX variant and the gRNA exhibit at least a 2-fold, or at least a 3-fold, or at least a 4-fold, or at least a 5-fold, or at least a 10-fold cleavage rate compared to an RNP of a reference CasX protein of SEQ ID NO: 1, SEQ ID NO: 2, or SEQ ID NO: 3 and the gRNA of Table 2. In the foregoing embodiment, the improved competency rate can be demonstrated in an in vitro assay, such as described in the Examples.

[0266] In some embodiments, a CasX variant protein has increased target strand loading for double strand cleavage compared to a reference CasX. Variants with increased target strand loading activity can be generated, for example, through amino acid changes in the TLS domain. Without wishing to be bound by theory, amino acid changes in the TSL domain may result in CasX variant proteins with improved catalytic activity. Alternatively, or in addition, amino acid changes around the binding channel for the RNA:DNA duplex may also improve catalytic activity of the CasX variant protein.

[0267] In some embodiments, a CasX variant protein has increased collateral cleavage activity compared to a reference CasX protein. As used herein, “collateral cleavage activity” refers to additional, non-targeted cleavage of nucleic acids following recognition and cleavage of a target nucleic acid sequence. In some embodiments, a CasX variant protein has decreased collateral cleavage activity compared to a reference CasX protein.

[0268] Exemplary methods for characterizing the catalytic activity of CasX proteins may include, but are not limited to, in vitro cleavage assays, including those of the Examples, below. In some embodiments, electrophoresis of DNA products on agarose gels can interrogate the kinetics of strand cleavage.

n. Affinity for Target RNA

[0269] In some embodiments, a ribonucleoprotein complex comprising a reference CasX protein or variant thereof binds to a target RNA and cleaves the target nucleic acid. In some embodiments, variants of a reference CasX protein increase the specificity of the CasX variant protein for a target RNA and increase the activity of the CasX variant protein with respect to a target RNA when compared to the reference CasX protein. For example, CasX variant proteins can display increased binding affinity for target RNAs, or increased cleavage of target RNAs, when compared to reference CasX proteins. In some embodiments, a ribonucleoprotein complex comprising a CasX variant protein binds to a target RNA and/or cleaves the target RNA. In some embodiments, a CasX variant has at least about two-fold to about 10-fold increased binding affinity to the target nucleic acid compared to the reference protein of SEQ ID NO: 1, SEQ ID NO: 2, or SEQ ID NO: 3, or to the CasX variant of SEQ ID NO: 270, or SEQ ID NO: 336.

o. Catalytically-dead CasX variants

[0270] In some embodiments, for example those embodiments encompassing applications where cleavage of the target nucleic acid sequence is not a desired outcome, improving the catalytic activity of a CasX variant protein comprises altering, reducing, or abolishing the catalytic activity of the CasX variant protein. In some embodiments, the disclosure provides catalytically-dead CasX variant proteins that, while able to bind a target nucleic acid when complexed with a gRNA having a targeting sequence complementary to the target nucleic acid, are not able to cleave the target nucleic acid. Exemplary catalytically-dead CasX proteins comprise one or more mutations in the active site of the RuvC domain of the CasX protein. In some embodiments, a catalytically-dead CasX variant protein comprises substitutions at residues 672, 769 and/or 935 relative to SEQ ID NO: 1. In one embodiment, a catalytically-dead CasX variant protein comprises substitutions of D672A, E769A and/or D935A relative to a reference CasX protein of SEQ ID NO: 1. In other embodiments, a catalytically-dead CasX variant protein comprises substitutions at amino acids 659, 756 and/or 922 relative to a reference CasX protein of SEQ ID NO: 2. In some embodiments, a catalytically-dead CasX variant protein comprises D659A, E756A and/or D922A substitutions relative to a reference CasX protein of SEQ ID NO: 2. In some embodiments, a catalytically-dead CasX variant 527, 668 and 676 proteins comprise D660A, E757A, and D922A modifications to abolish the endonuclease activity. In further embodiments, a catalytically-dead CasX protein comprises deletions of all or part of the RuvC domain of the CasX protein. It will be understood that the same foregoing substitutions can similarly be introduced into the CasX variants of the disclosure, resulting in a catalytically-dead CasX (dCasX) variant. In one embodiment, all or a portion of the RuvC domain is deleted from the CasX variant, resulting in a dCasX variant. Catalytically inactive dCasX variant proteins can, in some embodiments, be used for base editing or epigenetic modifications. With a higher affinity for DNA, in some embodiments, catalytically inactive dCasX variant proteins can, relative to catalytically active CasX, find their target nucleic acid faster, remain bound to target nucleic acid for longer periods of time, bind target nucleic acid in a more stable fashion, or a combination thereof, thereby improving these functions of the catalytically-dead CasX variant protein compared to a CasX variant that retains its cleavage capability. Exemplary dCasX variant sequences are disclosed as SEQ ID NOS: 44-62 and 1232-1235 as set forth in Table 7. In some embodiments, a dCasX variant is at least 80% identical, at least 85% identical, at least 90% identical, at least 95% identical, at least 96% identical, at least 97% identical, at least 98% identical, or at least 99% identical to a sequence of SEQ ID NOS: 44-62 or 1232-1235 and retains the functional properties of a dCasX variant protein. In some embodiments, a dCasX variant comprises a sequence of SEQ ID NOS: 44-62 or 1232-1235.

TABLE 7
Catalytically-dead CasX Variant Proteins

| Construct | SEQ ID NO |
|---|---|
| CAS100 | 44 |
| CAS098 | 45 |
| CAS085 | 46 |
| CAS087 | 47 |
| CAS086 | 48 |
| CAS083 | 49 |
| CAS082 | 50 |
| CAS069 | 51 |
| CAS068 | 52 |
| CAS070 | 53 |
| CAS071 | 54 |
| CAS072 | 55 |
| CAS073 | 56 |
| CAS074 | 57 |
| CAS075 | 58 |
| CAS076 | 59 |
| CAS077 | 60 |
| CAS078 | 61 |
| CAS081 | 62 |
| CAS096 | 1232 |
| CAS401 | 1233 |
| CAS142 (dCasX527) | 1234 |
| CAS402 (dCasX676) | 1235 |

p. CasX Fusion Proteins

[0271] In some embodiments, the disclosure provides CasX variant proteins comprising a heterologous protein fused to the CasX, including the CasX variant of any of the embodiments described herein. This includes CasX variants comprising N-terminal, C-terminal, or internal fusions of the CasX to a heterologous protein or domain thereof.

[0272] In some embodiments, the CasX fusion protein comprises any one of the variants SEQ ID NOS: 247-592 or 1147-1231 or the sequences of Table 3, fused to one or more proteins or domains thereof that have a different activity of interest, resulting in a fusion protein. In some embodiments, the CasX fusion protein comprises any one of the variants SEQ ID NOS: 270-592 or 1147-1231, fused to one or more proteins or domains thereof that have a different activity of interest. In some embodiments, the CasX fusion protein comprises any one of the variants SEQ ID NOS: 415-592 or 1147-1231, fused to one or more proteins or domains thereof that have a different activity of interest. For example, in some embodiments, the CasX variant protein is fused to a protein (or domain thereof) that inhibits transcription, modifies a target nucleic acid, or modifies a polypeptide associated with a nucleic acid (e.g., histone modification).

[0273] In some embodiments, a heterologous polypeptide (or heterologous amino acid such as a cysteine residue or a non-natural amino acid) can be inserted at one or more positions within a CasX protein to generate a CasX fusion protein. In other embodiments, a cysteine residue can be inserted at one or more positions within a CasX protein followed by conjugation of a heterologous polypeptide described below. In some alternative embodiments, a heterologous polypeptide or heterologous amino acid can be added at the N- or C-terminus of the reference or CasX variant protein. In other embodiments, a heterologous polypeptide or heterologous amino acid can be inserted internally within the sequence of the CasX protein.

[0274] In some embodiments, the CasX variant fusion protein retains RNA-guided sequence specific target nucleic acid binding and cleavage activity. In some cases, the CasX variant fusion protein has (retains) 50% or more of the activity (e.g., cleavage and/or binding activity) of the corresponding CasX variant protein that does not have the insertion of the heterologous protein. In some cases, the CasX variant fusion protein retains at least about 60%, or at least about 70%, at least about 80%, or at least about 90%, or at least about 92%, or at least about 95%, or at least about 98%, or about 100% of the activity (e.g., cleavage and/or binding activity) of the corresponding CasX protein that does not have the insertion of the heterologous protein.

[0275] In some cases, the reference CasX or CasX variant fusion protein retains (has) target nucleic acid binding activity relative to the activity of the CasX protein without the inserted heterologous amino acid or heterologous polypeptide. In some cases, the reference CasX or CasX variant fusion protein retains at least about 60%, or at least about 70%, at least about 80%, or at least about 90%, or at least about 92%, or at least about 95%, or at least about 98%, or about 100% of the binding activity of the corresponding CasX protein that does not have the insertion of the heterologous protein.

[0276] In some cases, the CasX variant fusion protein retains (has) target nucleic acid binding and/or cleavage activity relative to the activity of the parent CasX protein without the inserted heterologous amino acid or heterologous polypeptide. For example, in some cases, the CasX variant fusion protein has (retains) 50% or more of the binding and/or cleavage activity of the corresponding parent CasX protein (the CasX protein that does not have the insertion). For example, in some cases, the CasX variant fusion protein has (retains) 60% or more (70% or more, 80% or more, 90% or more, 92% or more, 95% or more, 98% or more, or 100%) of the binding and/or cleavage activity of the corresponding CasX parent protein (the CasX protein that does not have the insertion). Methods of measuring cleaving and/or binding activity of a CasX protein and/or a CasX fusion protein will be known to one of ordinary skill in the art, and any convenient method can be used.

[0277] A variety of heterologous polypeptides are suitable for inclusion in a CasX variant fusion protein of the disclosure. In some cases, the fusion partner can modulate transcription (e.g., inhibit transcription, increase transcription) of a target nucleic acid. For example, in some cases the fusion partner is a protein (or a domain from a protein) that inhibits transcription (e.g., a transcriptional repressor, a protein that functions via recruitment of transcription inhibitor proteins, modification of target nucleic acid such as methylation, recruitment of a DNA modifier, modulation of histones associated with target nucleic acid, recruitment of a histone modifier such as those that modify acetylation and/or methylation of histones, and the like). In some cases, the fusion partner is a protein (or a domain from a protein) that increases transcription (e.g., a transcription activator, a protein that acts via recruitment of transcription activator proteins, modification of target nucleic acid such as demethylation, recruitment of a DNA modifier, modulation of histones associated with target nucleic acid, recruitment of a histone modifier such as those that modify acetylation and/or methylation of histones, and the like).

[0278] In some cases, a fusion partner has enzymatic activity that modifies a target nucleic acid sequence; e.g., nuclease activity, methyltransferase activity, demethylase activity, DNA repair activity, DNA damage activity, deamination activity, dismutase activity, alkylation activity, depurination activity, oxidation activity, pyrimidine dimer forming activity, integrase activity, transposase activity, recombinase activity, polymerase activity, ligase activity, helicase activity, photolyase activity or glycosylase activity. In some embodiments, a CasX variant comprises any one of SEQ ID NOS: 247-592 or 1147-1231 and a polypeptide with methyltransferase activity, demethylase activity, acetyltransferase activity, deacetylase activity, kinase activity, phosphatase activity, ubiquitin ligase activity, deubiquitinating activity, adenylation activity, deadenylation activity, SUMOylating activity, deSUMOylating activity, ribosylation activity, deribosylation activity, myristoylation activity or demyristoylation activity. In some embodiments, a CasX variant comprises any one of SEQ ID NOS: 270-592 or 1147-1231 and a polypeptide as described supra. In some embodiments, a CasX variant comprises any one of SEQ ID NOS: 415-592 or 1147-1231 and a polypeptide as described supra.

[0279] Examples of proteins (or fragments thereof) that can be used as a fusion partner to increase transcription include but are not limited to: transcriptional activators such as VP16, VP64, VP48, VP160, p65 subdomain (e.g., from NFkB), and activation domain of EDLL and/or TAL activation domain (e.g., for activity in plants); histone lysine methyltransferases such as SET1A, SET1B, MLL1 to 5, ASH1, SYMD2, NSD1, and the like; histone lysine demethylases such as JHDM2a/b, UTX, JMJD3, and the like; histone acetyltransferases such as GCN5, PCAF, CBP, p300, TAF1, TIP60/PLIP, MOZ/MYST3, MORF/MYST4, SRC1, ACTR, P160, CLOCK, and the like; and DNA demethylases such as Ten-Eleven Translocation (TET) dioxygenase 1 (TET1CD), TET1, DME, DML1, DML2, ROS1, and the like.

[0280] Examples of proteins (or fragments thereof) that can be used as a fusion partner to decrease transcription include but are not limited to: transcriptional repressors such as the Kruppel associated box (KRAB or SKD); KOX1 repression domain; the Mad mSIN3 interaction domain (SID); the ERF repressor domain (ERD), the SRDX repression domain (e.g., for repression in plants), and the like; histone lysine methyltransferases such as Pr-SET7/8, SUV4-20H1, RIZ1, and the like; histone lysine demethylases such as JMJD2A/JHDM3A, JMJD2B, JMJD2C/GASC1, JMJD2D, JARID1A/RBP2, JARID1B/PLU-1, JARID 1C/SMCX, JARID1D/SMCY, and the like; histone lysine deacetylases such as HDAC1, HDAC2, HDAC3, HDAC8, HDAC4, HDAC5, HDAC7, HDAC9, SIRT1, SIRT2, HDAC11, and the like; DNA methylases such as HhaI DNA m5c-methyltransferase (M.HhaI), DNA methyltransferase 1 (DNMT1), DNA methyltransferase 3a (DNMT3a), DNA methyltransferase 3b (DNMT3b), METI, DRM3 (plants), ZMET2, CMT1, CMT2 (plants), and the like; and periphery recruitment elements such as Lamin A, Lamin B, and the like.

[0281] In some cases, the fusion partner to a CasX variant has enzymatic activity that modifies the target nucleic acid (e.g., ssRNA, dsRNA, ssDNA, dsDNA). Examples of enzymatic activity that can be provided by the fusion partner include but are not limited to: nuclease activity such as that provided by a restriction enzyme (e.g., FokI nuclease), methyltransferase activity such as that provided by a methyltransferase (e.g., Hhal DNA m5c-methyltransferase (M.Hhal), DNA methyltransferase 1 (DNMT1), DNA methyltransferase 3a (DNMT3a), DNA methyltransferase 3b (DNMT3b), METI, DRM3 (plants), ZMET2, CMT1, CMT2 (plants), and the like); demethylase activity such as that provided by a demethylase (e.g., Ten-Eleven Translocation (TET) dioxygenase 1 (TET 1 CD), TET1, DME, DML1, DML2, ROS1, and the like), DNA repair activity, DNA damage activity, deamination activity such as that provided by a deaminase (e.g., a cytosine deaminase enzyme, e.g., an APOBEC protein such as rat apolipoprotein B mRNA editing enzyme, catalytic polypeptide 1 {APOBEC1}), dismutase activity, alkylation activity, depurination activity, oxidation activity, pyrimidine dimer forming activity, integrase activity such as that provided by an integrase and/or resolvase (e.g., Gin invertase such as the hyperactive mutant of the Gin invertase, GinH106Y; human immunodeficiency virus type 1 integrase (IN); Tn3 resolvase; and the like), transposase activity, recombinase activity such as that provided by a recombinase (e.g., catalytic domain of Gin recombinase), polymerase activity, ligase activity, helicase activity, photolyase activity, and glycosylase activity).

[0282] In some cases, a CasX variant protein of the present disclosure is fused to a polypeptide selected from a domain for increasing transcription (e.g., a VP16 domain, a VP64 domain), a domain for decreasing transcription (e.g., a KRAB domain, e.g., from the KoxI protein), a core catalytic domain of a histone acetyltransferase (e.g., histone acetyltransferase p300), a protein/domain that provides a detectable signal (e.g., a fluorescent protein such as GFP), a nuclease domain (e.g., a Fokl nuclease), or a base editor (e.g., cytidine deaminase such as APOBEC1).

[0283] In some embodiments, a CasX variant comprises any one of SEQ ID NOS: 247-592 or 1147-1231, or any one of SEQ ID NOS: 270-592 or 1147-1231, or any one of SEQ ID NOS: 415-592 or 1147-1231, or a sequence of Table 3, fused to a polypeptide selected from the group consisting of a domain for decreasing transcription, a domain with enzymatic activity, a core catalytic domain of a histone acetyltransferase, a protein/domain that provides a detectable signal, a nuclease domain, and a base editor. In some embodiments, a CasX variant comprises any one of SEQ ID NOS: 247-592 or 1147-1231 fused to a polypeptide selected from the group consisting of a domain for decreasing transcription, a domain with enzymatic activity, a core catalytic domain of a histone acetyltransferase, a protein/domain that provides a detectable signal, a nuclease domain, and a base editor. In some embodiments, a CasX variant comprises any one of SEQ ID NOS: 270-592 or 1147-1231 fused to a polypeptide described supra. In some embodiments, a CasX variant comprises any one of SEQ ID NOS: 415-592 or 1147-1231 fused to a polypeptide described supra. In some embodiments, a CasX variant comprises any one of SEQ ID NOS: 760-789 fused to a polypeptide selected from the group consisting of a domain for decreasing transcription, a domain with enzymatic activity, a core catalytic domain of a histone acetyltransferase, a protein/domain that provides a detectable signal, a nuclease domain, and a base editor. In some embodiments, a CasX variant comprises any one of SEQ ID NOS: 411-592 fused to a polypeptide selected from the group consisting of a domain for decreasing transcription, a domain with enzymatic activity, a core catalytic domain of a histone acetyltransferase, a protein/domain that provides a detectable signal, a nuclease domain, and a base editor.

[0284] In some cases, a reference CasX protein or CasX variant of the present disclosure is fused to a base editor. Base editors include those that can alter a guanine, adenine, cytosine, thymine, or uracil base on a nucleoside or nucleotide. Base editors include, but are not limited to an adenosine deaminase, cytosine deaminase (e.g., APOBEC1), and guanine oxidase. Accordingly, any of the CasX variants provided herein may comprise (i.e., are fused to) a base editor; for example a CasX variant of the disclosure may be fused to an adenosine deaminase, a cytosine deaminase, or a guanine oxidase. In exemplary embodiments, a CasX variant of the disclosure comprising any one of SEQ ID NOS: 247-592 or 1147-1231 is fused to an adenosine deaminase, cytosine deaminase, or a guanine oxidase. In further exemplary embodiments, a CasX variant of the disclosure comprising any one of SEQ ID NOS: 270-592 or 1147-1231 is fused to an adenosine deaminase, cytosine deaminase, or a guanine oxidase. In further exemplary embodiments, a CasX variant of the disclosure comprising any one of SEQ ID NOS: 415-592 or 1147-1231 is fused to an adenosine deaminase, cytosine deaminase, or a guanine oxidase.

[0285] In some cases, the fusion partner to a CasX variant has enzymatic activity that modifies a protein associated with the target nucleic acid (e.g., ssRNA, dsRNA, ssDNA, dsDNA) (e.g., a histone, an RNA binding protein, a DNA binding protein, and the like). Examples of enzymatic activity (that modifies a protein associated with a target nucleic acid) that can be provided by the fusion partner with a CasX variant include but are not limited to: methyltransferase activity such as that provided by a histone methyltransferase (HMT) (e.g., suppressor of variegation 3-9 homolog 1 (SUV39H1, also known as KMT1A), euchromatic histone lysine methyltransferase 2 (G9A, also known as KMT1C and EHMT2), SUV39H2, ESET/SETDB 1, and the like, SET1A, SET1B, MLL1 to 5, ASH1, SMYD2, NSD1, DOT1 like histone lysine methyltransferase (DOT1L), Pr-SET7/8, lysine methyltransferase 5B (SUV4-20H1), enhancer of zeste 2 polycomb repressive complex 2 subunit (EZH2), PR/SET domain 2 (RIZ1), demethylase activity such as that provided by a histone demethylase (e.g., Lysine Demethylase 1A (KDM1A also known as LSD1), JHDM2a/b, JMJD2A/JHDM3A, JMJD2B, JMJD2C/GASC1, JMJD2D, JARID1A/RBP2, JARID1B/PLU-1, JARID1C/SMCX, JARID1D/SMCY, UTX, JMJD3, and the like), acetyltransferase activity such as that provided by a histone acetylase transferase (e.g., catalytic core/fragment of the human acetyltransferase p300, GCN5, PCAF, CBP, TAF1, TIP60/PLIP, MOZ/MYST3, MORF/MYST4, HB01/MYST2, HMOF/MYST1, SRC1, ACTR, P160, CLOCK, and the like), deacetylase activity such as that provided by a histone deacetylase (e.g., HDAC1, HDAC2, HDAC3, HDAC8, HDAC4, HDAC5, HDAC7, HDAC9, SIRT1, SIRT2, HDAC11, and the like), kinase activity, phosphatase activity, ubiquitin ligase activity, deubiquitinating activity, adenylation activity, deadenylation activity, SUMOylating activity, deSUMOylating activity, ribosylation activity, deribosylation activity, myristoylation activity, and demyristoylation activity.

[0286] Additional examples of suitable fusion partners to a CasX variant are (i) a dihydrofolate reductase (DHFR) destabilization domain (e.g., to generate a chemically controllable subject RNA-guided polypeptide), and (ii) a chloroplast transit peptide.

[0287] In some embodiments, a CasX variant comprises any one of SEQ ID NOS: 247-592 or 1147-1231, or any one of SEQ ID NOS: 270-592 or 1147-1231, or any one of SEQ ID NOS: 415-592 or 1147-1231, or a sequence of Table 3, and a chloroplast transit peptide including, but are not limited to:

(SEQ ID NO: 338)
MASMISSSAVTTVSRASRGQSAAMAPFGGLKSMTGFPVRKVNTDITSI
TSNGGRVKCMQVWPPIGKKKFETLSYLPPLTRDSRA;
(SEQ ID NO: 339)
MASMISSSAVTTVSRASRGQSAAMAPFGGLKSMTGFPVRKVNTDITSI
TSNGGRVKS;
(SEQ ID NO: 340)
MASSMLSSATMVASPAQATMVAPENGLKSSAAFPATRKANNDITSITS
NGGRVNCMQVWPPIEKKKFETLSYLPDLTDSGGRVNC;
(SEQ ID NO: 341)
MAQVSRICNGVQNPSLISNLSKSSQRKSPLSVSLKTQQHPRAYPISSS
WGLKKSGMTLIGSELRPLKVMSSVSTAC;
(SEQ ID NO: 342)
MAQVSRICNGVWNPSLISNLSKSSQRKSPLSVSLKTQQHPRAYPISSS
WGLKKSGMTLIGSELRPLKVMSSVSTAC;
(SEQ ID NO: 343)
MAQINNMAQGIQTLNPNSNFHKPQVPKSSSFLVFGSKKLKNSANSMLV
LKKDSIFMQLFCSFRISASVATAC;
(SEQ ID NO: 344)
MAALVTSQLATSGTVLSVTDRFRRPGFQGLRPRNPADAALGMRTVGAS
AAPKQSRKPHRFDRRCLSMVV;
(SEQ ID NO: 345)
MAALTTSQLATSATGFGIADRSAPSSLLRHGFQGLKPRSPAGGDATSL
SVTTSARATPKQQRSVQRGSRRFPSVVVC;
(SEQ ID NO: 346)
MASSVLSSAAVATRSNVAQANMVAPFTGLKSAASFPVSRKQNLDITSI
ASNGGRVQC;
(SEQ ID NO: 347)
MESLAATSVFAPSRVAVPAARALVRAGTVVPTRRTSSTSGTSGVKCSA
AVTPQASPVISRSAAAA;
and
(SEQ ID NO: 348)
MGAAATSMQSLKFSNRLVPPSRRLSPVPNNVTCNNLPKSAAPVRTVKC
CASSWNSTINGAAATTNGASAASS.

[0288] In some cases, a CasX variant protein of the present disclosure can include an endosomal escape peptide. In some cases, an endosomal escape polypeptide comprises the amino acid sequence GLFXALLXLLXSLWXLLLXA (SEQ ID NO: 349), wherein each X is independently selected from lysine, histidine, and arginine. In some cases, an endosomal escape polypeptide comprises the amino acid sequence GLFHALLHLLHSLWHLLLHA (SEQ ID NO: 350), or HHHHHHHHH (SEQ ID NO: 351). In some embodiments, a CasX variant comprises a sequence of any one of SEQ ID NOS: 247-592 or 1147-1231, or any one of SEQ ID NOS: 270-592 or 1147-1231, or any one of SEQ ID NOS: 415-592 or 1147-1231, or a sequence of Table 3, and an endosomal escape polypeptide.

[0289] Non-limiting examples of suitable fusion partners for a CasX variant for use when targeting ssRNA target nucleic acids include (but are not limited to): splicing factors (e.g., RS domains); protein translation components (e.g., translation initiation, elongation, and/or release factors; e.g., eukaryotic translation initiation factor 4 gamma {eIF4G}); RNA methylases; RNA editing enzymes (e.g., RNA deaminases, e.g., adenosine deaminase acting on RNA (ADAR), including A to I and/or C to U editing enzymes); helicases; RNA-binding proteins; and the like. It is understood that a heterologous polypeptide can include the entire protein or in some cases can include a fragment of the protein (e.g., a functional domain).

[0290] In some embodiments, a CasX variant of any one of SEQ ID NOS: 247-592 or 1147-1231, or any one of SEQ ID NOS: 270-592 or 1147-1231, or any one of SEQ ID NOS: 415-592 or 1147-1231, or a sequence of Table 3, comprises a fusion partner of any domain capable of interacting with ssRNA (which, for the purposes of this disclosure, includes intramolecular and/or intermolecular secondary structures, e.g., double-stranded RNA duplexes such as hairpins, stem-loops, etc.), whether transiently or irreversibly, directly or indirectly, including but not limited to an effector domain selected from the group comprising; endonucleases (for example RNase III, the CRR22 DYW domain, Dicer, and PIN (PilT N-terminus) domains from proteins such as SMG5 and SMG6); proteins and protein domains responsible for stimulating RNA cleavage (for example cleavage and polyadenylation specific factor {CPSF}, cleavage stimulation factor {CstF}, CFIm and CFIIm); exonucleases (for example chromatin-binding exonuclease XRN1 (XRN-1) or Exonuclease T); deadenylases (for example DNA 5′-adenosine monophosphate hydrolase {HNT3}); proteins and protein domains responsible for nonsense mediated RNA decay (for example UPF1 RNA helicase and ATPase {UPF1}, UPF2, UPF3, UPF3b, RNP SI, RNA binding motif protein 8A {Y14}, DEK proto-oncogene {DEK}, RNA-processing protein REF2 {REF2}, and Serine-arginine repetitive matrix 1 {SRm160}); proteins and protein domains responsible for stabilizing RNA (for example poly(A) binding protein cytoplasmic 1 {PABP}); proteins and protein domains responsible for repressing translation (for example argonaute RISC catalytic component 2 {Ago2} and Ago4); proteins and protein domains responsible for stimulating translation (for example Staufen); proteins and protein domains responsible for (e.g., capable of) modulating translation (e.g., translation factors such as initiation factors, elongation factors, release factors, etc., e.g., eIF4G); proteins and protein domains responsible for polyadenylation of RNA (for example poly(A) polymerase (PAP1), PAP-associated domain-containing protein; Poly(A) RNA polymerase gld-2 {GLD-2}, and Star-PAP); proteins and protein domains responsible for polyuridinylation of RNA (for example Terminal uridylyltransferase {CID1} and terminal uridylate transferase); proteins and protein domains responsible for RNA localization (for example from insulin like growth factor 2 mRNA binding protein 1 {JIMP1}, Z-DNA binding protein 1 {ZBP1}, She2p, She3p, and Bicaudal-D); proteins and protein domains responsible for nuclear retention of RNA (for example Rrp6); proteins and protein domains responsible for nuclear export of RNA (for example nuclear RNA export factor 1 {TAP}, nuclear RNA export factor 1 {NXF1}, THO Complex {THO}, TREX, REF, and Aly/REF export factor {Aly}); proteins and protein domains responsible for repression of RNA splicing (for example polypyrimidine tract binding protein 1 {PTB}, KH RNA binding domain containing, signal transduction associated 1 Sam681, and heterogeneous nuclear ribonucleoprotein A1 {hnRNP A1}); proteins and protein domains responsible for stimulation of RNA splicing (for example serine/arginine-rich (SR) domains); proteins and protein domains responsible for reducing the efficiency of transcription (for example FUS RNA binding protein {FUS (TLS)}); and proteins and protein domains responsible for stimulating transcription (for example cyclin dependent kinase 7 {CDK7} and HIV Tat). Alternatively, the effector domain may be selected from the group comprising endonucleases; proteins and protein domains capable of stimulating RNA cleavage; exonucleases; deadenylases; proteins and protein domains having nonsense mediated RNA decay activity; proteins and protein domains capable of stabilizing RNA; proteins and protein domains capable of repressing translation; proteins and protein domains capable of stimulating translation; proteins and protein domains capable of modulating translation (e.g., translation factors such as initiation factors, elongation factors, release factors, etc., e.g., eIF4G); proteins and protein domains capable of polyadenylation of RNA; proteins and protein domains capable of polyuridinylation of RNA; proteins and protein domains having RNA localization activity; proteins and protein domains capable of nuclear retention of RNA; proteins and protein domains having RNA nuclear export activity; proteins and protein domains capable of repression of RNA splicing; proteins and protein domains capable of stimulation of RNA splicing; proteins and protein domains capable of reducing the efficiency of transcription; and proteins and protein domains capable of stimulating transcription. Another suitable heterologous polypeptide is a PUF RNA-binding domain, which is described in more detail in WO2012068627, which is hereby incorporated by reference in its entirety.

[0291] Some RNA splicing factors that can be used (in whole or as fragments thereof) as a fusion partner with a CasX variant have modular organization, with separate sequence-specific RNA binding modules and splicing effector domains. For example, members of the serine/arginine-rich (SR) protein family contain N-terminal RNA recognition motifs (RRMs) that bind to exonic splicing enhancers (ESEs) in pre-mRNAs and C-terminal RS domains that promote exon inclusion. As another example, the hnRNP protein hnRNP A1 binds to exonic splicing silencers (ESSs) through its RRM domains and inhibits exon inclusion through a C-terminal glycine-rich domain. Some splicing factors can regulate alternative use of splice site (ss) by binding to regulatory sequences between the two alternative sites. For example, ASF/SF2 can recognize ESEs and promote the use of intron proximal sites, whereas hnRNP A1 can bind to ESSs and shift splicing towards the use of intron distal sites. One application for such factors is to generate ESFs that modulate alternative splicing of endogenous genes, particularly disease associated genes. For example, BCL2 like 1 (Bcl-x) pre-mRNA produces two splicing isoforms with two alternative 5′ splice sites to encode proteins of opposite functions. The long splicing isoform Bcl-xL is a potent apoptosis inhibitor expressed in long-lived post mitotic cells and is up-regulated in many cancer cells, protecting cells against apoptotic signals. The short isoform Bcl-xS is a pro-apoptotic isoform and expressed at high levels in cells with a high turnover rate (e.g., developing lymphocytes). The ratio of the two Bcl-x splicing isoforms is regulated by multiple cc-elements that are located in either the core exon region or the exon extension region (i.e., between the two alternative 5′ splice sites). For more examples, see WO2010075303, which is hereby incorporated by reference in its entirety.

[0292] Further suitable fusion partners for use with a CasX variant include, but are not limited to, proteins (or fragments thereof) that are boundary elements (e.g., CTCF), proteins and fragments thereof that provide periphery recruitment (e.g., Lamin A, Lamin B, etc.), and protein docking elements (e.g., FKBP/FRB, Pill/Abyl, etc.).

[0293] Additionally or alternatively, a CasX variant protein of the present disclosure may be fused to a polypeptide permeant domain to promote uptake by the cell. A number of permeant domains are known in the art and may be used in the non-integrating polypeptides of the present disclosure, including peptides, peptidomimetics, and non-peptide carriers. For example, WO2017/106569 and US20180363009A1, incorporated by reference herein in its entirety, describe fusion of a Cas protein with one or more nuclear localization sequences (NLS) to facilitate cell uptake. In other embodiments, a permeant peptide may be derived from the third alpha helix of Drosophila melanogaster transcription factor Antennapaedia, referred to as penetratin, which comprises the amino acid sequence RQIKIWFQNRRMKWKK (SEQ ID NO: 398). As another example, the permeant peptide comprises the HIV-1 tat basic region amino acid sequence, which may include, for example, amino acids 49-57 of naturally-occurring tat protein. Other permeant domains include poly-arginine motifs, for example, the region of amino acids 34-56 of HIV-1 rev protein, nona-arginine, octa-arginine, and the like. The site at which the fusion is made may be selected in order to optimize the biological activity, secretion or binding characteristics of the polypeptide. The optimal site will be determined by routine experimentation.

[0294] In some cases, a heterologous polypeptide (a fusion partner) for use with a CasX variant provides for subcellular localization; i.e., the heterologous polypeptide contains a subcellular localization sequence (e.g., a nuclear localization signal (NLS) for targeting to the nucleus, a sequence to keep the fusion protein out of the nucleus, e.g., a nuclear export sequence (NES), a sequence to keep the fusion protein retained in the cytoplasm, a mitochondrial localization signal for targeting to the mitochondria, a chloroplast localization signal for targeting to a chloroplast, an ER retention signal, and the like). In some embodiments, a subject RNA-guided polypeptide or a conditionally active RNA-guided polypeptide and/or subject CasX fusion protein does not include a NLS so that the protein is not targeted to the nucleus, which can be advantageous; e.g., when the target nucleic acid is an RNA that is present in the cytosol. In some embodiments, a fusion partner can provide a tag (i.e., the heterologous polypeptide is a detectable label) for ease of tracking and/or purification (e.g., a fluorescent protein, e.g., green fluorescent protein (GFP), yellow fluorescent protein (YFP), red fluorescent protein (RFP), cyan fluorescent protein (CFP), mCherry, tdTomato, and the like; a histidine tag, e.g., a 6XHis tag; a hemagglutinin (HA) tag; a FLAG tag; a Myc tag; and the like). In some embodiments, a CasX variant comprises any one of SEQ ID NOS: XX-XX and a subcellular localization sequence or a tag.

[0295] In some cases, a reference or CasX variant protein includes (is fused to) a nuclear localization signal (NLS). Non-limiting examples of NLSs suitable for use with a CasX variant include sequences having at least about 80%, at least about 90%, or at least about 95% identity or are identical to sequences derived from: the NLS of the SV40 virus large T-antigen, having the amino acid sequence PKKKRKV (SEQ ID NO: 352); the NLS from nucleoplasmin (e.g., the nucleoplasmin bipartite NLS with the sequence KRPAATKKAGQAKKKK (SEQ ID NO: 353); the c-myc NLS having the amino acid sequence PAAKRVKLD (SEQ ID NO: 354)) or RQRRNELKRSP (SEQ ID NO: 355); the hRNPAI M9 NLS having the sequence NQSSNFGPMKGGNFGGRSSGPYGGGGQYFAKPRNQGGY (SEQ ID NO: 356); the sequence RMRIZFKNKGKDTAELRRRRVEVSVELRKAKKDEQILKRRNV (SEQ ID NO: 357) of the IBB domain from importin-alpha; the sequences VSRKRPRP (SEQ ID NO: 358) and PPKKARED (SEQ ID NO: 359) of the myoma T protein; the sequence PQPKKKPL (SEQ ID NO: 360) of human p53; the sequence SALIKKKKKMAP (SEQ ID NO: 361) of mouse c-abl IV; the sequences DRLRR (SEQ ID NO: 362) and PKQKKRK (SEQ ID NO: 363) of the influenza virus NS1; the sequence RKLKKKIKKL (SEQ ID NO: 364) of the Hepatitis virus delta antigen; the sequence REKKKFLKRR (SEQ ID NO: 365) of the mouse Mxl protein; the sequence KRKGDEVDGVDEVAKKKSKK (SEQ ID NO: 366) of the human poly(ADP-ribose) polymerase; the sequence RKCLQAGMNLEARKTKK (SEQ ID NO: 367) of the steroid hormone receptors (human) glucocorticoid; the sequence PRPRKIPR (SEQ ID NO: 368) of Boma disease virus P protein (BDV-P1); the sequence PPRKKRTVV (SEQ ID NO: 369) of hepatitis C virus nonstructural protein (HCV-NS5A); the sequence NLSKKKKRKREK (SEQ ID NO: 370) of LEF1; the sequence RRPSRPFRKP (SEQ ID NO: 371) of ORF57 simirae; the sequence KRPRSPSS (SEQ ID NO: 372) of EBV LANA; the sequence KRGINDRNFWRGENERKTR (SEQ ID NO: 373) of Influenza A protein; the sequence PRPPKMARYDN (SEQ ID NO: 374) of human RNA helicase A (RHA); the sequence KRSFSKAF (SEQ ID NO: 375) of nucleolar RNA helicase II; the sequence KLKIKRPVK (SEQ ID NO: 376) of TUS-protein; the sequence PKKKRKVPPPPAAKRVKLD (SEQ ID NO: 377) associated with importin-alpha; the sequence PKTRRRPRRSQRKRPPT (SEQ ID NO: 378) from the Rex protein in HTLV-1; the sequence SRRRKANPTKLSENAKKLAKEVEN (SEQ ID NO: 379) from the EGL-13 protein of Caenorhabditis elegans; and the sequences KTRRRPRRSQRKRPPT (SEQ ID NO: 380), RRKKRRPRRKKRR (SEQ ID NO: 381), PKKKSRKPKKKSRK (SEQ ID NO: 382), HKKKHPDASVNFSEFSK (SEQ ID NO: 383), QRPGPYDRPQRPGPYDRP (SEQ ID NO: 384), LSPSLSPLLSPSLSPL (SEQ ID NO: 385), RGKGGKGLGKGGAKRHRK (SEQ ID NO: 386), PKRGRGRPKRGRGR (SEQ ID NO: 387), PKKKRKVPPPPAAKRVKLD (SEQ ID NO: 388), PKKKRKVPPPPKKKRKV (SEQ ID NO: 389), PAKRARRGYKC (SEQ ID NO: 63), KLGPRKATGRW (SEQ ID NO: 64), PRRKREE (SEQ ID NO: 65), PYRGRKE (SEQ ID NO:66), PLRKRPRR (SEQ ID NO: 67), PLRKRPRRGSPLRKRPRR (SEQ ID NO:68), PAAKRVKLDGGKRTADGSEFESPKKKRKV (SEQ ID NO: 69), PAAKRVKLDGGKRTADGSEFESPKKKRKVGIHGVPAA (SEQ ID NO: 70), PAAKRVKLDGGKRTADGSEFESPKKKRKVAEAAAKEAAAKEAAAKA (SEQ ID NO: 71), PAAKRVKLDGGKRTADGSEFESPKKKRKVPG (SEQ ID NO: 72), KRKGSPERGERKRHW (SEQ ID NO: 73), KRTADSQHSTPPKTKRKVEFEPKKKRKV (SEQ ID NO: 74), and PKKKRKVGGSKRTADSQHSTPPKTKRKVEFEPKKKRKV (SEQ ID NO: 75). In some embodiments, the one or more NLS are linked to the CRISPR protein or to adjacent NLS with a linker peptide wherein the linker peptide is selected from the group consisting of RS, (G)n (SEQ ID NO: 1023), (GS)n (SEQ ID NO: 1024), (GSGGS)n (SEQ ID NO: 399), (GGSGGS)n (SEQ ID NO: 400), (GGGS)n (SEQ ID NO: 401), GGSG (SEQ ID NO: 402), GGSGG (SEQ ID NO: 403), GSGSG (SEQ ID NO: 404), GSGGG (SEQ ID NO: 405), GGGSG (SEQ ID NO: 406), GSSSG (SEQ ID NO: 407), GPGP (SEQ ID NO: 408), GGP, PPP, PPAPPA (SEQ ID NO: 409), PPPG (SEQ ID NO: 24), PPPGPPP (SEQ ID NO: 410), PPP(GGGS)n (SEQ ID NO: 25), (GGGS)nPPP (SEQ ID NO: 26), AEAAAKEAAAKEAAAKA (SEQ ID NO: 1025), and TPPKTKRKVEFE (SEQ ID NO: 27), where n is 1 to 5. In general, NLS (or multiple NLSs) are of sufficient strength to drive accumulation of a CasX variant fusion protein in the nucleus of a eukaryotic cell. Detection of accumulation in the nucleus may be performed by any suitable technique. For example, a detectable marker may be fused to a CasX variant fusion protein such that location within a cell may be visualized. Cell nuclei may also be isolated from cells, the contents of which may then be analyzed by any suitable process for detecting protein, such as immunohistochemistry, Western blot, or enzyme activity assay. Accumulation in the nucleus may also be determined indirectly.

[0296] The disclosure contemplates assembly of multiple NLS in various configurations for linkage to the CRISPR protein. In some embodiments, 1, 2, 3, 4 or more NLS are linked by linker peptides to the N-terminus of the CRISPR protein. In other embodiments, 1, 2, 3, 4 or more NLS are linked by linker peptides to the C-terminus of the CRISPR protein. In some embodiments, the NLS linked to the N-terminus of the CRISPR protein are identical to the NLS linked to the C-terminus. In other embodiments, the NLS linked to the N-terminus of the CRISPR protein are different to the NLS linked to the C-terminus. In some embodiments, the NLS linked to the N-terminus of the CRISPR protein are selected from the group consisting of the N-terminal sequences as set forth in Table 8. In some embodiments, the NLS linked to the C-terminus of the CRISPR protein are selected from the group consisting of the C-terminal sequences as set forth in Table 8. Detection of accumulation in the nucleus may be performed by any suitable technique. For example, a detectable marker may be fused to a reference or CasX variant fusion protein such that location within a cell may be visualized. Cell nuclei may also be isolated from cells, the contents of which may then be analyzed by any suitable process for detecting protein, such as immunohistochemistry, Western blot, or enzyme activity assay. Accumulation in the nucleus may also be determined indirectly.

TABLE 8
NLS Sequences

| | SEQ | | SEQ |
|---|---|---|---|
| | ID | | ID |
| N-terminal Sequences | NO | C-terminal Sequences | NO |
| PKKKRKVGGSPKKKRKVSRQEIKRI | 219 | TLESPAAKRVKLDGGSPAAKRVKLDGG | 1236 |
| NKIRRRLVKDSNTKKAGKTGP | | SPAAKRVKLDGGSPAAKRVKLDGGSPA | |
| | | AKRVKLDGGSPAAKRVKLDTLESKRPA | |
| | | ATKKAGQAKKKKGGSKRPAATKKAGQA | |
| | | KKKKGGSKRPAATKKAGQAKKKKGGSK | |
| | | RPAATKKAGQAKKKK | |
| PKKKRKVGGSPKKKRKVGGSPKKKR | 220 | TLESKRPAATKKAGQAKKKKTLESKRP | 1237 |
| KVGGSPKKKRKVSRQEIKRINKIRR | | AATKKAGQAKKKKGGSKRPAATKKAGQ | |
| RLVKDSNTKKAGKTGP | | AKKKKGGSKRPAATKKAGQAKKKKGGS | |
| | | KRPAATKKAGQAKKKKGGSKRPAATKK | |
| | | AGQAKKKKGGSKRPAATKKAGQAKKKK | |
| PKKKRKVGGSPKKKRKVGGSPKKKRKVGGS | 221 | TLESKRPAATKKAGQAKKKKGGSKRPA | 1238 |
| PKKKRKVGGSPKKKRKVGGSPKKKRKVSRQ | | ATKKAGQAKKKKTLESPKKKRKVGGSP | |
| EIKRINKIRRRLVKDSNTKKAGKTGP | | KKKRKVGGSPKKKRKVGGSPKKKRKV | |
| PAAKRVKLDGGSPAAKRVKLDSRQEIKRIN | 222 | TLEGGSPKKKRKVTLESPKKKRKVGGS | 1239 |
| KIRRRLVKDSNTKKAGKTGP | | PKKKRKVGGSPKKKRKVGGSPKKKRKV | |
| PAAKRVKLDGGSPAAKRVKLDGGSPAAKRV | 223 | TLEGGSPKKKRKVTLESPAAKRVKLDG | 1240 |
| KLDGGSPAAKRVKLDSRQEIKRINKIRRRL | | GSPAAKRVKLDGGSPAAKRVKLDGGSP | |
| VKDSNTKKAGKTGP | | AAKRVKLD | |
| PAAKRVKLDGGSPAAKRVKLDGGSPAAKRV | 224 | TLEGGSPKKKRKVTLESPAAKRVKLDG | 1241 |
| KLDGGSPAAKRVKLDGGSPAAKRVKLDGGS | | GSPAAKRVKLDGGSPAAKRVKLDGGSP | |
| PAAKRVKLDSRQEIKRINKIRRRLVKDSNT | | AAKRVKLDGGSPAAKRVKLDGGSPAAK | |
| KKAGKTGP | | RVKLD | |
| KRPAATKKAGQAKKKKSRDISRQEIKRINK | 225 | TLEGGSPKKKRKVTLESKRPAATKKAG | 1242 |
| IRRRLVKDSNTKKAGKTGP | | QAKKKK | |
| KRPAATKKAGQAKKKKSRQEIKRINKIRRR | 226 | TLEGGSPKKKRKVTLESKRPAATKKAG | 1243 |
| LVKDSNTKKAGKTGP | | QAKKKKGGSKRPAATKKAGQAKKKK | |
| KRPAATKKAGQAKKKKGGSKRPAATKKAGQ | 227 | TLEGGSPKKKRKVTLEGGSPKKKRKV | 1244 |
| AKKKKSRDISRQEIKRINKIRRRLVKDSNT | | | |
| KKAGKTGP | | | |
| KRPAATKKAGQAKKKKGGSKRPAATKKAGQ | 228 | TLEGGSPKKKRKVTLEGGSPKKKRKV | 1244 |
| AKKKKGGSKRPAATKKAGQAKKKKGGSKRP | | | |
| AATKKAGQAKKKKSRDISRQEIKRINKIRR | | | |
| RLVKDSNTKKAGKTGP | | | |
| KRPAATKKAGQAKKKKGGSKRPAATKKAGQ | 229 | TLEGGSPKKKRKVTLEGGSPKKKRKV | 1244 |
| AKKKKGGSKRPAATKKAGQAKKKKGGSKRP | | | |
| AATKKAGQAKKKKGGSKRPAATKKAGQAKK | | | |
| KKGGSKRPAATKKAGQAKKKKSRDISRQEI | | | |
| KRINKIRRRLVKDSNTKKAGKTGP | | | |
| PKKKRKVGGSPKKKRKVGGSPKKKRKVGGS | 230 | TLEGGSPKKKRKVTLEGGSPKKKRKV | 1244 |
| PKKKRKVSRDISRQEIKRINKIRRRLVKDS | | | |
| NTKKAGKTGP | | | |
| PKKKRKVGGSPKKKRKVGGSPKKKRKVGGS | 230 | TLEGGSPKKKRKVTLEGGSPKKKRKV | 1244 |
| PKKKRKVSRDISRQEIKRINKIRRRLVKDS | | | |
| NTKKAGKTGP | | | |
| PAAKRVKLDGGSPAAKRVKLDGGSPAAKRV | 231 | TLEVGPKRTADSQHSTPPKTKRKVEFE | 1245 |
| KLDGGSPAAKRVKLDSRDISRQEIKRINKI | | PKKKRKVTLEGGSPKKKRKV | |
| RRRLVKDSNTKKAGKTGP | | | |
| PAAKRVKLDGGSPAAKRVKLDGGSPAAKRV | 232 | TLEVGGGSGGGSKRTADSQHSTPPKTK | 1246 |
| KLDGGSPAAKRVKLDGGSPAAKRVKLDGGS | | RKVEFEPKKKRKVTLEGGSPKKKRKV | |
| PAAKRVKLDSRDISRQEIKRINKIRRRLVK | | | |
| DSNTKKAGKTGP | | | |
| KRPAATKKAGQAKKKKSRDISRQEIKRINK | 225 | TLEVAEAAAKEAAAKEAAAKAKRTADS | 1247 |
| IRRRLVKDSNTKKAGKTGP | | QHSTPPKTKRKVEFEPKKKRKVTLEGG | |
| | | SPKKKRKV | |
| KRPAATKKAGQAKKKKGGSKRPAATKKAGQ | 227 | TLEVGPPKKKRKVGGSKRTADSQHSTP | 1248 |
| AKKKKSRDISRQEIKRINKIRRRLVKDSNT | | PKTKRKVEFEPKKKRKVTLEGGSPKKK | |
| KKAGKTGP | | RKV | |
| PAAKRVKLDGGKRTADGSEFESPKKKRKVG | 233 | TLEVGPAEAAAKEAAAKEAAAKAPAAK | 1249 |
| GSSRDISRQEIKRINKIRRRLVKDSNTKKA | | RVKLDTLEGGSPKKKRKV | |
| GKTGP | | | |
| PAAKRVKLDGGKRTADGSEFESPKKKRKVP | 234 | TLEVGPGGGSGGGSGGGSPAAKRVKLD | 1250 |
| PPPGSRDISRQEIKRINKIRRRLVKDSNTK | | TLEVGPKRTADSQHSTPPKTKRKVEFE | |
| KAGKTGP | | PKKKRKV | |
| PAAKRVKLDGGKRTADGSEFESPKKKRKVG | 235 | TLEVGPPKKKRKVPPPPAAKRVKLDTL | 1251 |
| IHGVPAAPGSRDISRQEIKRINKIRRRLVK | | EVGGGSGGGSKRTADSQHSTPPKTKRK | |
| DSNTKKAGKTGP | | VEFEPKKKRKV | |
| PAAKRVKLDGGKRTADGSEFESPKKKRKVG | 236 | TLEVGPPAAKRVKLDTLEVAEAAAKEA | 1252 |
| GGSGGGSPGSRDISRQEIKRINKIRRRLVK | | AAKEAAAKAKRTADSQHSTPPKTKRKV | |
| DSNTKKAGKTGP | | EFEPKKKRKV | |
| PAAKRVKLDGGKRTADGSEFESPKKKRKVP | 239 | TLEVGPKRTADSQHSTPPKTKRKVEFE | 1253 |
| GGGSGGGSPGSRDISRQEIKRINKIRRRLV | | PKKKRKVTLEVGPPKKKRKVGGSKRTA | |
| KDSNTKKAGKTGP | | DSQHSTPPKTKRKVEFEPKKKRKV | |
| PAAKRVKLDGGKRTADGSEFESPKKKRKVA | 983 | TLEVGGGSGGGSKRTADSQHSTPPKTK | 1254 |
| EAAAKEAAAKEAAAKAPGSRDISRQEIKRI | | RKVEFEPKKKRKVTLEVGPAEAAAKEA | |
| NKIRRRLVKDSNTKKAGKTGP | | AAKEAAAKAPAAKRVKLD | |
| PAAKRVKLDGGKRTADGSEFESPKKKRKVP | 984 | GSKRPAATKKAGQAKKKKTLEVGPGGG | 1255 |
| GSRDISRQEIKRINKIRRRLVKDSNTKKAG | | SGGGSGGGSPAAKRVKLD | |
| KTGP | | | |
| PAAKRVKLDGGSPKKKRKVGGSSRDISRQE | 985 | GSKRPAATKKAGQAKKKKTLEVGPPKK | 1256 |
| IKRINKIRRRLVKDSNTKKAGKTGP | | KRKVPPPPAAKRVKLD | |
| PAAKRVKLDPPPPKKKRKVPGSRDISRQEI | 986 | GSKRPAATKKAGQAKKKKTLEVGPPAA | 1257 |
| KRINKIRRRLVKDSNTKKAGKTGP | | KRVKLD | |
| PAAKRVKLDPGRSRDISRQEIKRINKIRRR | 987 | GSPKKKRKVTLEVGPKRTADSQHSTPP | 1258 |
| LVKDSNTKKAGKTGP | | KTKRKVEFEPKKKRKV | |
| PKKKRKVSRDISRQEIKRINKIRRRLVKDS | 988 | GSKRPAATKKAGQAKKKKTLEVGGGSG | 1259 |
| NTKKAGKTGP | | GGSKRTADSQHSTPPKTKRKVEFEPKK | |
| | | KRKV | |
| PAAKRVKLDGGKRTADGSEFESPKKKRKVG | 233 | GSKRPAATKKAGQAKKKKGSKRPAATK | 1260 |
| GSSRDISRQEIKRINKIRRRLVKDSNTKKA | | KAGQAKKKK | |
| GKTGP | | | |
| PAAKRVKLDGGKRTADGSEFESPKKKRKVG | 236 | GSKRPAATKKAGQAKKKKGSKRPAATK | 1261 |
| GGSGGGSPGSRDISRQEIKRINKIRRRLVK | | KAGQAKKKK | |
| DSNTKKAGKTGP | | | |
| PKKKRKVSRQEIKRINKIRRRLVKDSNTKK | 989 | GSKRPAATKKAGQAKKKKGSKRPAATK | 1262 |
| AGKTGP | | KAGQAKKKK | |
| PKKKRKVGGSPKKKRKVGGSPKKKRKVGGS | 220 | GSPKKKRKVGSPKKKRKV | 1263 |
| PKKKRKVSRQEIKRINKIRRRLVKDSNTKK | | | |
| AGKTGP | | | |
| PKKKRKVGGSPKKKRKVGGSPKKKRKVGGS | 221 | GGGSGGGSKRTADSQHSTPPKTKRKVE | 1264 |
| PKKKRKVGGSPKKKRKVGGSPKKKRKVSRQ | | FEPKKKRKVGSKRPAATKKAGQAKKKK | |
| EIKRINKIRRRLVKDSNTKKAGKTGP | | | |
| PAAKRVKLDSRQEIKRINKIRRRLVKDSNT | 990 | GPPKKKRKVGGSKRTADSQHSTPPKTK | 1265 |
| KKAGKTGP | | RKVEFEPKKKRKVGSKRPAATKKAGQA | |
| | | KKKK | |
| PAAKRVKLDGGSPAAKRVKLDSRQEIKRIN | 222 | TGGGPGGGAAAGSGSPKKKRKVGSGSG | 1266 |
| KIRRRLVKDSNTKKAGKTGP | | SKRPAATKKAGQAKKKK | |
| PAAKRVKLDGGSPAAKRVKLDGGSPAAKRV | 223 | GPKRTADSQHSTPPKTKRKVEFEPKKK | 1267 |
| KLDGGSPAAKRVKLDSRQEIKRINKIRRRL | | RKVGSKRPAATKKAGQAKKKK | |
| VKDSNTKKAGKTGP | | | |
| PAAKRVKLDGGSPAAKRVKLDGGSPAAKRV | 224 | AEAAAKEAAAKEAAAKAKRTADSQHST | 1268 |
| KLDGGSPAAKRVKLDGGSPAAKRVKLDGGS | | PPKTKRKVEFEPKKKRKVGSPKKKRKV | |
| PAAKRVKLDSRQEIKRINKIRRRLVKDSNT | | | |
| KKAGKTGP | | | |
| KRPAATKKAGQAKKKKSRQEIKRINKIRRR | 226 | GPPKKKRKVPPPPAAKRVKLDGGGSGG | 1269 |
| LVKDSNTKKAGKTGP | | GSKRTADSQHSTPPKTKRKVEFEPKKK | |
| | | RKV | |
| TSPKKKRKVALEYPYDVPDYA | 991 | GSPAAKRVKLDGGSPAAKRVKLDGGSP | 1270 |
| | | AAKRVKLDGGSPAAKRVKLDGGSPAAK | |
| | | RVKLDGGSPAAKRVKLDGPPKKKRKVG | |
| | | GSKRTADSQHSTPPKTKRKVEFEPKKK | |
| | | RKV | |
| TLESKRPAATKKAGQAKKKKAPGEYPYDVP | 992 | GSPAAKRVKLGGSPAAKRVKLGGSPKK | 1271 |
| DYA | | KRKVGGSPKKKRKVTGGGPGGGAAAGS | |
| | | GSPKKKRKVGSGS | |
| GSKRPAATKKAGQAKKKKYPYDVPDYA | 993 | GSKRPAATKKAGQAKKKKGGSKRPAAT | 1272 |
| | | KKAGQAKKKKGPKRTADSQHSTPPKTK | |
| | | RKVEFEPKKKRKV | |
| TLESKRPAATKKAGQAKKKKGGSKRPAATK | 1274 | GSKRPAATKKAGQAKKKKGGSKRPAAT | 1273 |
| KAGQAKKKKAPGEYPYDVPDYATSPKKKRK | | KKAGQAKKKKAEAAAKEAAAKEAAAKA | |
| VALEYPYDVPDYA | | KRTADSQHSTPPKTKRKVEFEPKKKRK | |
| | | V | |
| TLESKRPAATKKAGQAKKKKGGSKRPAATK | 1275 | GPPKKKRKVPPPPAAKRVKLD | 1018 |
| KAGQAKKKKGGSKRPAATKKAGQAKKKKGG | | | |
| SKRPAATKKAGQAKKKKTSPKKKRKVALEY | | | |
| PYDVPDYA | | | |
| TLESKRPAATKKAGQAKKKKGGSKRPAATK | 1276 | GSPAAKRVKLDGGSPAAKRVKLDGGSP | 1019 |
| KAGQAKKKKGGSKRPAATKKAGQAKKKKGG | | AAKRVKLDGGSPAAKRVKLDGGSPAAK | |
| SKRPAATKKAGQAKKKKGGSKRPAATKKAG | | RVKLDGGSPAAKRVKLD | |
| QAKKKKGGSKRPAATKKAGQAKKKKTSPKK | | | |
| KRKVALEYPYDVPDYA | | | |
| TLESPKKKRKVGGSPKKKRKVGGSPKKKRK | 1277 | GSPAAKRVKLGGSPAAKRVKLGGSPKK | 1020 |
| VGGSPKKKRKVTLESKRPAATKKAGQAKKK | | KRKVGGSPKKKRKV | |
| KAPGEYPYDVPDYA | | | |
| TLESPKKKRKVGGSPKKKRKVGGSPKKKRK | 1278 | GSKRPAATKKAGQAKKKKGGSKRPAAT | 1021 |
| VGGSPKKKRKVGSKRPAATKKAGQAKKKKY | | KKAGQAKKKK | |
| PYDVPDYA | | | |
| TLESPAAKRVKLDGGSPAAKRVKLDGGSPA | 1279 | GSKRPAATKKAGQAKKKKGGSKRPAAT | 1021 |
| AKRVKLDGGSPAAKRVKLDTLESKRPAATK | | KKAGQAKKKK | |
| KAGQAKKKKGGSKRPAATKKAGQAKKKKAP | | | |
| GEYPYDVPDYA | | | |

[0297] In some embodiments, a CasX variant comprises any one of SEQ ID NOS: 247-592 or 1147-1231, or any one of SEQ ID NOS: 270-592 or 1147-1231, or any one of SEQ ID NOS: 415-592 or 1147-1231, or a sequence of Table 3, fused to one or more NLS of any one of SEQ ID NOS: 63-75, 219-236, 239, 352-389, 983-1021, 1237-1278 or any of the sequences of Table 8. In some embodiments, one or more NLS are fused to or near the N-terminus of the CasX variant. In some embodiments, one or more NLS are fused to or near the C-terminus of the CasX variant. In some embodiments, one or more NLS are fused to both the N- and C-terminus of the CasX variant. In some embodiments, an NLS is linked to another NLS by a linker.

[0298] In some cases, a reference or CasX variant fusion protein includes a “Protein Transduction Domain” or PTD (also known as a CPP—cell penetrating peptide), which refers to a protein, polynucleotide, carbohydrate, or organic or inorganic compound that facilitates traversing a lipid bilayer, micelle, cell membrane, organelle membrane, or vesicle membrane. A PTD attached to another molecule, which can range from a small polar molecule to a large macromolecule and/or a nanoparticle, facilitates the molecule traversing a membrane, for example going from an extracellular space to an intracellular space, or from the cytosol to within an organelle. In some embodiments, a PTD is covalently linked to the amino terminus of a reference or CasX variant fusion protein. In some embodiments, a PTD is covalently linked to the carboxyl terminus of a reference or CasX variant fusion protein. In some cases, the PTD is inserted internally in the sequence of a reference or CasX variant fusion protein at a suitable insertion site. In some cases, a reference or CasX variant fusion protein includes (is conjugated to, is fused to) one or more PTDs (e.g., two or more, three or more, four or more PTDs). In some cases, a PTD includes one or more nuclear localization signals (NLS). Examples of PTDs include but are not limited to peptide transduction domain of HIV TAT comprising YGRKKRRQRRR (SEQ ID NO: 390), RKKRRQRR (SEQ ID NO: 391); YARAAARQARA (SEQ ID NO: 392); THRLPRRRRRR (SEQ ID NO: 393); and GGRRARRRRRR (SEQ ID NO: 394); a polyarginine sequence comprising a number of arginines sufficient to direct entry into a cell (e.g., 3, 4, 5, 6, 7, 8, 9, 10, or 10-50 arginines, SEQ ID NO: 1026); a VP22 domain (Zender et al. (2002) Cancer Gene Ther. 9(6):489-96); an Drosophila Antennapedia protein transduction domain (Noguchi et al. (2003) Diabetes 52(7): 1732-1737); a truncated human calcitonin peptide (Trehin et al. (2004) Pharm. Research 21:1248-1256); polylysine (Wender et al. (2000) Proc. Natl. Acad. Sci. USA 97: 13003-13008); RRQRRTSKLMKR (SEQ ID NO: 395); Transportan GWTLNSAGYLLGKINLKALAALAKKIL (SEQ ID NO: 396); KALAWEAKLAKALAKALAKHLAKALAKALKCEA (SEQ ID NO: 397); and RQIKIWFQNRRMKWKK (SEQ ID NO: 398). In some embodiments, the PTD is an activatable CPP (ACPP) (Aguilera et al. (2009) Integr Biol (Camb) June; 1(5-6): 371-381). ACPPs comprise a polycationic CPP (e.g., Arg9 or “R9”) connected via a cleavable linker to a matching polyanion (e.g., Glu9 or “E9”), which reduces the net charge to nearly zero and thereby inhibits adhesion and uptake into cells. Upon cleavage of the linker, the polyanion is released, locally unmasking the polyarginine and its inherent adhesiveness, thus “activating” the ACPP to traverse the membrane. In some embodiments, a CasX variant comprises any one of SEQ ID NOS: 247-592 or 1147-1231, or any one of SEQ ID NOS: 270-592 or 1147-1231, or any one of SEQ ID NOS: 415-592 or 1147-1231, or a sequence of Table 3 and a PTD.

[0299] In some embodiments, a CasX variant fusion protein can include a CasX protein that is linked to an internally inserted heterologous amino acid or heterologous polypeptide (a heterologous amino acid sequence) via a linker polypeptide (e.g., one or more linker polypeptides). In some embodiments, a reference or CasX variant fusion protein can be linked at the C-terminal and/or N-terminal end to a heterologous polypeptide (fusion partner) via a linker polypeptide (e.g., one or more linker polypeptides). The linker polypeptide may have any of a variety of amino acid sequences. Proteins can be joined by a spacer peptide, generally of a flexible nature, although other chemical linkages are not excluded. Suitable linkers include polypeptides of between 4 amino acids and 40 amino acids in length, or between 4 amino acids and 25 amino acids in length. These linkers are generally produced by using synthetic, linker-encoding oligonucleotides to couple the proteins. Peptide linkers with a degree of flexibility can be used. The linking peptides may have virtually any amino acid sequence, bearing in mind that the preferred linkers will have a sequence that results in a generally flexible peptide. The use of small amino acids, such as glycine and alanine, are of use in creating a flexible peptide. The creation of such sequences is routine to those of skill in the art. A variety of different linkers are commercially available and are considered suitable for use. Example linker polypeptides include glycine polymers (G)n, glycine-serine polymer (including, for example, (GS)n (SEQ ID NO: 1024), (GSGGS)n (SEQ ID NO: 399), (GGSGGS)n (SEQ ID NO: 400), and (GGGS)n (SEQ ID NO: 401), where n is an integer of at least one), glycine-alanine polymers, alanine-serine polymers, glycine-proline polymers, proline polymers and proline-alanine polymers. Example linkers can comprise amino acid sequences including, but not limited to RS, (G)n, (GS)n (SEQ ID NO: 1024), (GSGGS)n (SEQ ID NO: 399), (GGSGGS)n (SEQ ID NO: 400), (GGGS)n (SEQ ID NO: 401), GGSG (SEQ ID NO: 402), GGSGG (SEQ ID NO: 403), GSGSG (SEQ ID NO: 404), GSGGG (SEQ ID NO: 405), GGGSG (SEQ ID NO: 406), GSSSG (SEQ ID NO: 407), GPGP (SEQ ID NO:)408, GGP, PPP, PPAPPA (SEQ ID NO: 409), PPPG (SEQ ID NO: 24), PPPGPPP (SEQ ID NO: 410), PPP(GGGS)n (SEQ ID NO: 25), (GGGS)nPPP (SEQ ID NO: 26), AEAAAKEAAAKEAAAKA (SEQ ID NO: 1025), and TPPKTKRKVEFE (SEQ ID NO: 27), wherein n is 1 to 5. The ordinarily skilled artisan will recognize that design of a peptide conjugated to any elements described above can include linkers that are all or partially flexible, such that the linker can include a flexible linker as well as one or more portions that confer less flexible structure.

V. Methods of Making CasX Variant Protein and gRNA Variants

[0300] The CasX variant proteins and gRNA variants as described herein may be constructed through a variety of methods. Such methods may include, for example, Deep Mutational Evolution (DME), described below and in the Examples, as well as in applications PCT/US20/36506 and WO2020247883A2, incorporated by reference herein.

a. Deep Mutational Evolution (DME)

[0301] In some embodiments, DME is used to identify CasX protein and sgRNA scaffold variants with improved function. The DME method, in some embodiments, comprises building and testing a comprehensive set of mutations to a starting biomolecule to produce a library of biomolecule variants; for example, a library of CasX variant proteins or sgRNA scaffold variants. DME can encompass making all possible substitutions, as well as all possible small insertions, and all possible deletions of amino acids (in the case of proteins) or nucleotides (in the case of RNA or DNA) to the starting biomolecule. A schematic illustrating DME methods is shown in FIG. 16. In some embodiments, DME comprises a subset of all such possible substitutions, insertions, and deletions. In certain embodiments of DME, one or more libraries of variants are constructed, evaluated for functional changes, and this information used to construct one or more additional libraries. Such iterative construction and evaluation of variants may lead, for example, to identification of mutational themes that lead to certain functional outcomes, such as regions of the protein or RNA that, when mutated in a certain way, lead to one or more improved functions. Layering of such identified mutations may then further improve function, for example through additive or synergistic interactions. DME comprises library design, library construction, and library screening. In some embodiments, multiple rounds of design, construction, and screening are undertaken.

b. Library Design

[0302] DME methods produce variants of biomolecules, which are polymers of many monomers. In some embodiments, the biomolecule comprises a protein or a ribonucleic acid (RNA) molecule, wherein the monomer units are amino acids or ribonucleotides, respectively. The fundamental units of biomolecule mutation comprise either: (1) exchanging one monomer for another monomer of different identity (substitutions); (2) inserting one or more additional monomer in the biomolecule (insertions); or (3) removing one or more monomer from the biomolecule (deletions). DME libraries comprising substitutions, insertions, and deletions, alone or in combination, to any one or more monomers within any biomolecule described herein, are considered within the scope of the invention.

[0303] In some embodiments, DME is used to build and test the comprehensive set of mutations to a biomolecule, encompassing all possible substitutions, as well as small insertions and deletions of amino acids (in the case of proteins) or nucleotides (in the case of RNA). The construction and functional readout of these mutations can be achieved with a variety of established molecular biology methods. In some embodiments, the library comprises a subset of all possible modifications to monomers. For example, in some embodiments, a library collectively represents a single modification of one monomer, for at least 10% of the total monomer locations in a biomolecule, wherein each single modification is selected from the group consisting of substitution, single insertion, and single deletion. In some embodiments, the library collectively represents the single modification of one monomer, for at least 5%, at least 10%, at least 20%, at least 30%, at least 40%, at least 50%, at least 60%, at least 70%, at least 80%, at least 90%, at least 95%, or up to 100% of the total monomer locations in a starting biomolecule. In certain embodiments, for a certain percentage of the total monomer locations in a starting biomolecule, the library collectively represents each possible single modification of a one monomer, such as all possible substitutions with the 19 other naturally occurring amino acids (for a protein) or 3 other naturally occurring ribonucleotides (for RNA), insertion of each of the 20 naturally occurring amino acids (for a protein) or 4 naturally occurring ribonucleotides (for RNA), or deletion of the monomer. In still further embodiments, insertion at each location is independently greater than one monomer, for example insertion of two or more, three or more, or four or more monomers, or insertion of between one to four, between two to four, or between one to three monomers. In some embodiments, deletion at location is independently greater than one monomer, for example deletion of two or more, three or more, or four or more monomers, or deletion of between one to four, between two to four, or between one to three monomers. Examples of such libraries of CasX variants and gRNA variants are described in Examples 14 and 15, respectively.

[0304] In some embodiments, the biomolecule is a protein and the individual monomers are amino acids. In those embodiments where the biomolecule is a protein, the number of possible DME mutations at each monomer (amino acid) position in the protein comprise 19 amino acid substitutions, 20 amino acid insertions and 1 amino acid deletion, leading to a total of 40 possible mutations per amino acid in the protein.

[0305] In some embodiments, a DME library of CasX variant proteins comprising insertions is a 1 amino acid insertion library, a 2 amino acid insertion library, a 3 amino acid insertion library, a 4 amino acid insertion library, a 5 amino acid insertion library, a 6 amino acid insertion library, a 7 amino acid insertion library, an 8 amino acid insertion library, a 9 amino acid insertion library or a 10 amino acid insertion library. In some embodiments, a DME library of CasX variant proteins comprising insertions comprises between 1 and 4 amino acid insertions.

[0306] In some embodiments, the biomolecule is RNA. In those embodiments where the biomolecule is RNA, the number of possible DME mutations at each monomer (ribonucleotide) position in the RNA comprises 3 nucleotide substitutions, 4 nucleotide insertions, and 1 nucleotide deletion, leading to a total of 8 possible mutations per nucleotide.

[0307] In some embodiments, DME library design comprises enumerating all possible mutations for each of one or more target monomers in a biomolecule. As used herein, a “target monomer” refers to a monomer in a biomolecule polymer that is targeted for DME with the substitutions, insertions and deletions described herein. For example, a target monomer can be an amino acid at a specified position in a protein, or a nucleotide at a specified position in an RNA. A biomolecule can have at least 1, 2, 3, 4, 5, 6, 7, 8, 9, 10, 20, 30, 40, 50, 100 or more target monomers that are systematically mutated to produce a DME library of biomolecule variants. In some embodiments, every monomer in a biomolecule is a target monomer. For example, in DME of a protein where there are two target amino acids, DME library design comprises enumerating the 40 possible DME mutations at each of the two target amino acids. In a further example, in DME of an RNA where there are four target nucleotides, DME library design comprises enumerating the 8 possible DME mutations at each of the four target nucleotides. In some embodiments, each target monomer of a biomolecule is independently randomly selected or selected by intentional design. Thus, in some embodiments, a DME library comprises random variants, or variants that were designed, or variants comprising random mutations and designed mutations within a single biomolecule, or any combinations thereof.

[0308] In some embodiments of DME methods, DME mutations are incorporated into double-stranded DNA encoding the biomolecule. This DNA can be maintained and replicated in a standard cloning vector, for example a bacterial plasmid, referred to herein as the target plasmid. An exemplary target plasmid contains a DNA sequence encoding the starting biomolecule that will be subjected to DME, a bacterial origin of replication, and a suitable antibiotic resistance expression cassette. In some embodiments, the antibiotic resistance cassette confers resistance to kanamycin, ampicillin, spectinomycin, bleomycin, streptomycin, erythromycin, tetracycline or chloramphenicol. In some embodiments, the antibiotic resistance cassette confers resistance to kanamycin.

[0309] A library comprising said variants can be constructed in a variety of ways. In certain embodiments, plasmid recombineering is used to construct a library. Such methods can use DNA oligonucleotides encoding one or more mutations to incorporate said mutations into a plasmid encoding the reference biomolecule. For biomolecule variants with a plurality of mutations, in some embodiments more than one oligonucleotide is used. In some embodiments, the DNA oligonucleotides encoding one or more mutations wherein the mutation region is flanked by between 10 and 100 nucleotides of homology to the target plasmid, both 5′ and 3′ to the mutation. Such oligonucleotides can in some embodiments be commercially synthesized and used in PCR amplification. An exemplary template for an oligonucleotide encoding a mutation is provided below:

5′-(N)₁₀₋₁₀₀-Mutation-(N′)₁₀₋₁₀₀-3′

[0310] In this exemplary oligonucleotide design, the Ns represent a sequence identical to the target plasmid, referred to herein as the homology arms. When a particular monomer in the biomolecule is targeted for mutation, these homology arms directly flank the DNA encoding the monomer in the target plasmid. In some exemplary embodiments where the biomolecule undergoing DME is a protein, 40 different oligonucleotides, using the same set of homology arms, are used to encode the enumerated 40 different amino acid mutations for each amino acid residue in the protein that is targeted for DME. When the mutation is of a single amino acid, the region encoding the desired mutation or mutations comprises three nucleotides encoding an amino acid (for substitutions or single insertions), or zero nucleotides (for deletions). In some embodiments, the oligonucleotide encodes insertion of greater than one amino acid. For example, wherein the oligonucleotide encodes the insertion of X amino acids, the region encoding the desired mutation comprises 3*X nucleotides encoding the X amino acids. In some embodiments, the mutation region encodes more than one mutation, for example mutations to two or more monomers of a biomolecule that are in close proximity (e.g., next to each other, or within 1, 2, 3, 4, 5, 6, 7, 8, 9, or 10, or more monomers of each other).

[0311] In some exemplary embodiments where the biomolecule undergoing DME is an RNA, 8 different oligonucleotides, using the same set of homology arms, encode 8 different single nucleotide mutations for each nucleotide in the RNA that is targeted for DME. When the mutation is of a single ribonucleotide, the region of the oligo encoding the mutations can consist of the following nucleotide sequences: one nucleotide specifying a nucleotide (for substitutions or insertions), or zero nucleotides (for deletions). In some embodiments, the oligonucleotides are synthesized as single stranded DNA oligonucleotides. In some embodiments, all oligonucleotides targeting a particular amino acid or nucleotide of a biomolecule subjected to DME are pooled. In some embodiments, all oligonucleotides targeting a biomolecule subjected to DME are pooled. There is no limit to the type or number of mutations that can be created simultaneously in a DME library.

c. Library Screening

[0312] Any appropriate method for screening or selecting a DME library is envisaged as following within the scope of the inventions. High throughput methods may be used to evaluate large libraries with thousands of individual mutations. In some embodiments, the throughput of the library screening or selection assay has a throughput that is in the millions of individual cells. In some embodiments, assays utilizing living cells are preferred, because phenotype and genotype are physically linked in living cells by nature of being contained within the same lipid bilayer. Living cells can also be used to directly amplify sub-populations of the overall library. In other embodiments, smaller assays are used in DME methods, for example to screen a focused library developed through multiple rounds of mutation and evaluation. Exemplary methods of screening libraries are described in Examples 14 and 15.

[0313] In some embodiments, DME libraries that have been screened or selected for highly functional variants are further characterized. In some embodiments, further characterizing the DME library comprises analyzing DME variants individually through sequencing, such as Sanger sequencing, to identify the specific mutation or mutations that gave rise to the highly functional variant. Individual mutant variants of the biomolecule can be isolated through standard molecular biology techniques for later analysis of function. In some embodiments, further characterizing the DME library comprises high throughput sequencing of both the I library and the one or more libraries of highly functional variants. This approach may, in some embodiments, allow for the rapid identification of mutations that are over-represented in the one or more libraries of highly functional variants compared to the naive DME library. Without wishing to be bound by any theory, mutations that are over-represented in the one or more libraries of highly functional variants are likely to be responsible for the activity of the highly functional variants. In some embodiments, further characterizing the DME library comprises both sequencing of individual variants and high throughput sequencing of bothInaive library and the one or more libraries of highly functional variants.

[0314] High throughput sequencing can produce high throughput data indicating the functional effect of the library members. In embodiments wherein one or more libraries represents every possible mutation of every monomer location, such high throughput sequencing can evaluate the functional effect of every possible DME mutation. Such sequencing can also be used to evaluate one or more highly functional sub-populations of a given library, which in some embodiments may lead to identification of mutations that result in improved function. Deep Mutational Scanning

[0315] In some embodiments, Deep Mutational Scanning (DMS) is used to identify CasX variant proteins with improved function. Deep mutational scanning assesses protein plasticity as it relates to function. In DMS methods, every amino acid of a protein is changed to every other amino acid and absolute protein function assayed. For example, every amino acid in a CasX protein can be changed to every other amino acid, and the mutated CasX proteins assayed for their ability to bind to or cleave DNA. Exemplary assays such as the CRISPRi assay or bacterial-based cleavage assays that can be used to characterize collections of DMS CasX variant proteins are described in Oakes et al. (2016) “Profiling of engineering hotspots identifies an allosteric CRISPR-Cas9 switch” Nat Biotechnol 34(6):646-51 and Liu et al. (2019) “CasX enzymes comprise a distinct family of RNA-guided genome editors” Nature doi.org/10.1038/s41586-019-0908; the contents of which are incorporated herein by reference.

[0316] In some embodiments, DMS is used to identify CasX proteins with improved DNA binding activity. In some embodiments, DNA binding activity is assayed using a CRISPRi assay. In a non-limiting, exemplary embodiment of a CRISPRi assay, cells expressing a fluorescent protein such as green fluorescent protein (GFP) or red fluorescent protein (RFP) are assayed using FACS to identify CasX variants capable of repressing expression of the fluorescent protein in a sgRNA dependent fashion. In this example, a catalytically-dead CasX (dCasX) is used to generate the collection of DMS mutants being assayed. The wild-type CasX protein binds to its cognate sgRNA and forms a protein-RNA complex. The complex binds to specific DNA targets by Watson-Crick base pairing between the sgRNA and the DNA target, in this case a DNA sequence encoding the fluorescent protein. In the case of wild-type CasX, the DNA will be cleaved due to the nuclease activity of the CasX protein. However, without wishing to be bound by theory, it is likely that dCasX is still able to form a complex with the sgRNA and bind to specific DNA target. When targeting of dCasX occurs to the protein-coding region, it blocks RNA polymerase II and transcript initiation and/or elongation, leading to a reduction in fluorescent protein expression that can be detected by FACs.

[0317] In some embodiments, DMS is used to identify CasX proteins with improved DNA cleavage activity. Methods of assaying the DNA cleavage efficiency of CasX variant proteins will be apparent to one of ordinary skill in the art. For example, CasX proteins complexed with an sgRNA with a spacer complementary to a particular target nucleic acid sequence can be used to cleave the DNA target sequence in vitro or in vivo in a suitable cell type, and the frequency of insertions and deletions at the site of cleavage are assayed. Without wishing to be bound by theory, cleavage or nicking by CasX generates double-strand breaks in DNA, whose subsequent repair by the non-homologous end joining pathway (NHEJ) gives rise to small insertions or deletions (indels) at the site of the double-strand breaks. The frequency of indels at the site of CasX cleavage can be measured using high throughput or Sanger sequencing of the target sequence. Alternatively, or in addition, frequency of indel generation by CasX cleavage of a target sequence can be measured using mismatch assays such as T7 Endonuclease I (T7EI) or Surveyor mismatch assays.

[0318] In some embodiments, following DMS, a map of the genotypes of DMS mutants linked with their resulting phenotype (for example, a heat map) is generated and used to characterize fundamental principles of the protein. All possible mutations are characterized as leading to functional or nonfunctional protein products to establish that protein's functional landscape.

d. Error Prone PCR

[0319] In some embodiments, Error Prone PCR is used to generate CasX protein or sgRNA scaffold variants with improved function. Polymerases that replicate DNA have different levels of fidelity. One way of introducing random mutations to a gene is through an error prone polymerase that will incorporate incorrect nucleotides at a range of frequencies. This frequency can be modulated depending on the desired outcome. In some embodiments, a polymerase and conditions for polymerase activity are selected that result in a frequency of nucleotide changes that produces an average of n 1-4 amino acid changes in a protein sequence. An exemplary error prone polymerase comprises Agilent's GeneMorphII kit. The GeneMorphII kit can be used to amplify a DNA sequence encoding a wild type CasX protein (for example, a protein of SEQ ID NO: 1, SEQ ID NO: 2 or SEQ ID NO: 3), according to the manufacturer's protocol, thereby subjecting the protein to unbiased random mutagenesis and generating a diverse population of CasX variant proteins. This diverse population of CasX variant proteins can then be assayed using the same assays described above for DMS to observe how changes in genotype relate to changes in phenotype.

e. Cassette Mutagenesis

[0320] In some embodiments, cassette mutagenesis is used to generate CasX variant protein or sgRNA scaffold variants with improved function. Cassette mutagenesis takes advantage of unique restriction enzyme sites that are replaced by degenerative nucleotides to create small regions of high diversity in select areas of a gene of interest such as a CasX protein or sgRNA scaffold. In an exemplary cassette mutagenesis protocol, restriction enzymes are used to cleave near the sequence targeted for mutagenesis on DNA molecule encoding a CasX protein or sgRNA scaffold contained in a suitable vector. This step removes the sequence targeted for mutagenesis and everything between the restriction sites. Then, synthetic double stranded DNA molecules containing the desired mutation and ends that are complimentary to the restriction digest ends are ligated in place of the sequence that has been removed by restriction digest, and suitable cells, such as E. coli are transformed with the ligated vector. In some embodiments, cassette mutagenesis can be used to generate one or more specific mutations in a CasX protein or sgRNA scaffold. In some embodiments, cassette mutagenesis can be used to generate a library of CasX variant proteins or sgRNA scaffold variants that can be screened or selected for improved function using the methods described herein. For example, in using cassette mutagenesis to generate CasX variants, parts of the Non-Target Strand Binding (NTSB) domain can be replaced with a sequence of degenerate nucleotides. Sequences of degenerate nucleotides can be highly localized to regions of the CasX protein, for example regions of the NTSB that are of interest because of their highly mobile elements or their direct contacts with DNA. Libraries of CasX variant proteins generated via cassette mutagenesis can then be screened using the assays described herein for DME, DMS and error prone PCR and variants can be selected for improved function.

f. Random Mutagenesis

[0321] In some embodiments, random mutagenesis is used to generate CasX variant proteins or sgRNA scaffold variants with improved function. Random mutagenesis is an unbiased way of changing DNA. Exemplary methods of random mutagenesis will be known to the person of ordinary skill in the art and include exposure to chemicals, UV light, X-rays or use of unstable cell lines. Different mutagenic agents produce different types of mutations, and the ordinarily skilled artisan will be able to select the appropriate agent to generate the desired type of mutations. For example, ethylmethanesulfonate (EMS) and N-ethyl-N-nitrosourea (ENU) can be used to generate single base pair changes, while X-rays often result in deletions and gross chromosomal rearrangements. UV light exposure produces dimers between adjacent pyrimidines in DNA, which can result in point mutations, deletions and rearrangements. Error prone cell lines can also be used to introduce mutations, for example on a plasmid comprising a CasX protein or sgRNA scaffold of the disclosure. A population of DNA molecules encoding a CasX protein (for example, a protein of SEQ ID NO: 1, SEQ ID NO: 2 or SEQ ID NO: 3) or an sgRNA scaffold can be exposed to a mutagen to generate collection of CasX variant proteins or sgRNA scaffold variants, and these collections can be assayed for improved function using any of the assays described herein.

g. Staggered Extension Process (StEP)

[0322] In some embodiments, a staggered extension process (StEP) is used to generate CasX variant proteins or sgRNA scaffold variants with improved function. Staggered extension process is a specialized PCR protocol that allows for the breeding of multiple variants of a protein during a PCR reaction. StEP utilizes a polymerase with low processivity, (for example Taq or Vent polymerase) to create short primers off of two or more different template strands with a significant level of sequence similarity. The short primers are then extended for short time intervals allowing for shuffling of the template strands. This method can also be used as a means to stack DME variants. Exemplary StEP protocols are described by Zhao, H. et al. (1998) “Molecular evolution by staggered extension process (StEP) in vitro recombination” Nature Biotechnology 16: 258-261, the contents of which are incorporated herein by reference in their entirety. StEP can be used to generate collections of CasX variant proteins or sgRNA scaffold variants, and these collections can be assayed for improved function using any of the assays described herein.

h. Gene Shuffling

[0323] In some embodiments, gene shuffling is used to generate CasX variant proteins or sgRNA scaffold variants with improved function. In some embodiments, gene shuffling is used to combine (sometimes referred to herein as “stack”) variants produced through other methods described herein, such as plasmid recombineering. In an exemplary gene shuffling protocol, a DNase, for example DNase I, is used to shear a set of parent genes into pieces of 50-100 base pair (bp) in length. In some embodiments, these parent genes comprise CasX variant proteins with improved function created and isolated using the methods described herein. In some embodiments, these parent genes comprise sgRNA scaffold variants with improved function created and isolated using the methods described herein. Dnase fragmentation is then followed by a polymerase chain reaction (PCR) without primers. DNA fragments with sufficient overlapping homologous sequence will anneal to each other and are then extended by DNA polymerase. If different fragments comprising different mutations anneal, the result is a new variant combining those two mutations. In some embodiments, PCR without primers is followed by PCR extension, and purification of shuffled DNA molecules that have reached the size of the parental genes (e.g., a sequence encoding a CasX protein or sgRNA scaffold). These genes can then be amplified with another PCR, for example by adding PCR primers complementary to the 5′ and 3′ ends of gene undergoing shuffling. In some embodiments, the primers may have additional sequences added ‘o their 5’ ends, such as sequences for restriction enzyme recognition sites needed for ligation into a cloning vector.

i. Domain swapping

[0324] In some embodiments, domain swapping is used to generate CasX variant proteins or sgRNA scaffold variants with improved function. To generate CasX variant proteins, engineered domain swapping can be used to mix and match parts with other proteins and CRISPR molecules. For example, CRISPR proteins have conserved RuvC domains, so the CasX RuvC domain could be swapped for that of other CRISPR proteins, and the resulting protein assayed for improved DNA cleavage using the assays described herein. For sgRNAs, the scaffold stem, extended stem or loops can be exchanged with structures found in other RNAs, for example the scaffold stem and extended stem of the sgRNA can be exchanged with thermostable stem loops from other RNAs, and the resulting variant assayed for improved function using the assays described herein. In some embodiments, domain swapping can be used to insert new domains into the CasX protein or sgRNA. In some exemplary embodiments where domain swapping is applied to a protein, the inserted domain comprises an entire second protein.

j. Production of CasX and gRNA Variants

[0325] A CasX variant protein of the present disclosure may be produced in vitro by eukaryotic cells or by prokaryotic cells transformed with encoding vectors (described below) using standard cloning and molecularly biology techniques or as described in the Examples. The particular sequence and the manner of preparation will be determined by convenience, economics, purity required, and the like. In some embodiments, a construct is first prepared containing the DNA sequence encoding the CasX variant. Exemplary methods for the preparation of such constructs are described in the Examples. In some embodiments, the nucleotide sequence encoding a CasX protein is codon optimized for the intended host cell. The construct is then used to create an expression vector suitable for transforming a host cell, such as a prokaryotic or eukaryotic host cell for the expression and recovery of the protein. Where desired, the host cell is an E. coli. In other embodiments, the host cell is a eukaryotic cell. The eukaryotic host cell can be selected from Baby Hamster Kidney fibroblast (BHK) cells, human embryonic kidney 293 (HEK293), human embryonic kidney 293T (HEK293T), NSO cells, SP2/0 cells, YO myeloma cells, P3X63 mouse myeloma cells, PER cells, PER.C6 cells, hybridoma cells, NIH3T3 cells, CV-1 (simian) in Origin with SV40 genetic material (COS), HeLa, Chinese hamster ovary (CHO), or yeast cells, or other eukaryotic cells known in the art suitable for the production of recombinant products.

[0326] If desired, various groups may be introduced into the sequence during synthesis or during expression, which allow for linking to other molecules or to a surface. Thus, cysteines can be used to make thioethers, histidines for linking to a metal ion complex, carboxyl groups for forming amides or esters, amino groups for forming amides, and the like. A CasX variant protein of the disclosure may also be isolated and purified in accordance with conventional methods of recombinant synthesis. A lysate may be prepared of the expression host and the lysate purified using high performance liquid chromatography (HPLC), exclusion chromatography, gel electrophoresis, affinity chromatography, or other purification technique. For the most part, the compositions which are used will comprise 80% or more by weight of the desired product, more usually 90% or more by weight, preferably 95% or more by weight, and for therapeutic purposes, usually 99.5% or more by weight, in relation to contaminants related to the method of preparation of the product and its purification.

[0327] In the case of production of the gRNA of the present disclosure, recombinant expression vectors encoding the gRNA can be transcribed in vitro, for example using T7 promoter regulatory sequences and T7 polymerase in order to produce the gRNA, which can then be recovered by conventional methods; e.g., purification via gel electrophoresis as described in the Examples. Once synthesized, the gRNA may be utilized in the gene editing pair to directly contact a target nucleic acid or may be introduced into a cell by any of the well-known techniques for introducing nucleic acids into cells (e.g., microinjection, electroporation, transfection, etc.).

### VI. Polynucleotides and Vectors

[0328] In another aspect, the present disclosure relates to polynucleotides encoding the Class 2, Type V nucleases and gRNA that have utility in the editing of the target nucleic acid in a cell. In some embodiments, the disclosure provides polynucleotides encoding the CasX proteins and the polynucleotides of the gRNAs of any of the CasX:gRNA system embodiments described herein.

[0329] In some embodiments, the disclosure provides a polynucleotide sequence encoding the CasX variants of any of the embodiments described herein, including the CasX protein variants of SEQ ID NOS: 247-592 or 1147-1231 as described in Table 3 or sequences having at least about 50%, at least about 60%, at least about 70%, at least about 80%, at least about 90%, at least about 95%, at least about 96%, at least about 97%, at least about 98%, or at least about 99% sequence identity to a sequence of SEQ ID NOS: 247-592 and 1147-1231 of Table 3. In some embodiments, the disclosure provides a polynucleotide sequence encoding a CasX variant of any of SEQ ID NOS: 270-592 or 1147-1231 or a sequence having at least about 50%, at least about 60%, at least about 70%, at least about 80%, at least about 90%, at least about 95%, at least about 96%, at least about 97%, at least about 98%, or at least about 99% sequence identity thereto. In some embodiments, the disclosure provides a polynucleotide sequence encoding a CasX variant of any of SEQ ID NOS: 415-592 or 1147-1231 or a sequence having at least about 50%, at least about 60%, at least about 70%, at least about 80%, at least about 90%, at least about 95%, at least about 96%, at least about 97%, at least about 98%, or at least about 99% sequence identity thereto. In some embodiments, the disclosure provides an isolated polynucleotide sequence encoding a gRNA variant sequence of any of the embodiments described herein, including the sequences of SEQ ID NOS: 2101-2332 and 2353-2398 of Table 2, together with targeting sequences capable of hybridizing with the target nucleic acid to be modified. In some embodiments, the disclosure provides an isolated polynucleotide sequence encoding a gRNA variant sequence of any one of SEQ ID NOS: 2238-2332 or 2353-2398, together with targeting sequences capable of hybridizing with the target nucleic acid to be modified. In some embodiments, the disclosure provides an isolated polynucleotide sequence encoding a gRNA variant sequence of any one of SEQ ID NOS: 2281-2332 or 2353-2398, together with targeting sequences capable of hybridizing with the target nucleic acid to be modified.

[0330] In some embodiments, the disclosure provides donor template polynucleotides encoding portions or all of a gene to be modified. In some embodiments, the donor template is intended for gene editing in conjunction with the CasX:gRNA system and comprises at least a portion of the gene to be modified. In other embodiments, the donor sequence comprises a sequence that encodes at least a portion of an exon of the gene to be modified. In other embodiments, the donor template has a sequence that encodes at least a portion of an intron of the gene to be modified. In other embodiments, the donor template has a sequence that encodes at least a portion of an intron-exon junction of the gene to be modified. In other embodiments, the donor template has a sequence that encodes at least a portion of an intergenic region of the gene to be modified. In other embodiments, the donor template has a sequence that encodes at least a portion of a regulatory element of the gene to be modified. In some cases, the donor template is a wild-type sequence that encodes at least a portion of the gene to be modified. In other cases, the donor template sequence comprises one or more mutations relative to a wild-type gene to be knocked down or knocked out. In such cases, the donor template would have at least 1 to 5 or more mutations relative to the wild-type sequence. In the foregoing embodiments, the donor template is at least 10 nucleotides, at least 100 nucleotides, at least 200 nucleotides, at least 300 nucleotides, at least 400 nucleotides, at least 500 nucleotides, at least 600 nucleotides, at least 700 nucleotides, at least 800 nucleotides, at least 900 nucleotides, at least 1,000 nucleotides, at least 2,000 nucleotides, at least 3,000 nucleotides, at least 4,000 nucleotides, at least 5,000 nucleotides, at least 6,000 nucleotides, at least 7,000 nucleotides, at least 8,000 nucleotides, at least 9,000 nucleotides, at least 10,000 nucleotides, at least 12,000 nucleotides, or at least 15,000 nucleotides. In some embodiments, the donor template comprises at least about 10 to about 15,000 nucleotides. In some embodiments, the donor template is a single-stranded DNA template. In other embodiments, the donor template is a single stranded RNA template. In other embodiments, the donor template is a double-stranded DNA template. In some embodiments, the donor template can be provided as naked nucleic acid in the systems to edit the gene and does not need to be incorporated into a vector. In other embodiments, the donor template can be incorporated into a vector to facilitate its delivery to a cell; e.g., in a viral vector.

[0331] In other aspects, the disclosure relates to methods to produce polynucleotide sequences encoding the CasX variants, or the gRNA of any of the embodiments described herein, including homologous variants thereof, as well as methods to express the proteins expressed or RNA transcribed by the polynucleotide sequences. In general, the methods include producing a polynucleotide sequence coding for the CasX variants, or the gRNA of any of the embodiments described herein and incorporating the encoding gene into an expression vector appropriate for a host cell. Standard recombinant techniques in molecular biology can be used to make the polynucleotides and expression vectors of the present disclosure. For production of the encoded reference CasX, the CasX variants, or the gRNA of any of the embodiments described herein, the methods include transforming an appropriate host cell with an expression vector comprising the encoding polynucleotide, and culturing the host cell under conditions causing or permitting the resulting reference CasX, the CasX variants, or the gRNA of any of the embodiments described herein to be expressed or transcribed in the transformed host cell, thereby producing the CasX variants, or the gRNA, which are recovered by methods described herein or by standard purification methods known in the art or as described in the Examples

[0332] In accordance with the disclosure, nucleic acid sequences that encode the CasX variants, or the gRNA of any of the embodiments described herein (or their complement) are used to generate recombinant DNA molecules that direct the expression in appropriate host cells. Several cloning strategies are suitable for performing the present disclosure, many of which are used to generate a construct that comprises a gene coding for a composition of the present disclosure, or its complement. In some embodiments, the cloning strategy is used to create a gene that encodes a construct that comprises nucleotides encoding the CasX variants or the gRNA that is used to transform a host cell for expression of the composition.

[0333] In some approaches, a construct is first prepared containing the DNA sequence encoding a CasX variant or a gRNA. Exemplary methods for the preparation of such constructs are described in the Examples. The construct is then used to create an expression vector suitable for transforming a host cell, such as a prokaryotic or eukaryotic host cell for the expression and recovery of the protein construct, in the case of the CasX, or the gRNA. Where desired, the host cell is an E. coli. In other embodiments, the host cell is a eukaryotic cell. The eukaryotic host cell can be selected from Baby Hamster Kidney fibroblast (BHK) cells, human embryonic kidney 293 (HEK293), human embryonic kidney 293T (HEK293T), NSO cells, SP2/0 cells, YO myeloma cells, P3X63 mouse myeloma cells, PER cells, PER.C6 cells, hybridoma cells, NIH3T3 cells, CV-1 (simian) in Origin with SV40 genetic material (COS), HeLa, Chinese hamster ovary (CHO), or yeast cells, or other eukaryotic cells known in the art suitable for the production of recombinant products. Exemplary methods for the creation of expression vectors, the transformation of host cells and the expression and recovery of the CasX variants or the gRNA are described in the Examples.

[0334] The gene encoding the CasX variant, or the gRNA construct can be made in one or more steps, either fully synthetically or by synthesis combined with enzymatic processes, such as restriction enzyme-mediated cloning, PCR and overlap extension, including methods more fully described in the Examples. The methods disclosed herein can be used, for example, to ligate sequences of polynucleotides encoding the various components (e.g., CasX and gRNA) genes of a desired sequence. Genes encoding polypeptide compositions are assembled from oligonucleotides using standard techniques of gene synthesis.

[0335] In some embodiments, the nucleotide sequence encoding a CasX protein is codon optimized for the intended host cell. This type of optimization can entail a mutation of an encoding nucleotide sequence to mimic the codon preferences of the intended host organism or cell while encoding the same CasX protein. Thus, the codons can be changed, but the encoded protein or gRNA remains unchanged. For example, if the intended target cell of the CasX protein was a human cell, a human codon-optimized CasX-encoding nucleotide sequence could be used. As another non-limiting example, if the intended host cell were a mouse cell, then a mouse codon-optimized CasX-encoding nucleotide sequence could be generated. The gene design can be performed using algorithms that optimize codon usage and amino acid composition appropriate for the host cell utilized in the production of the reference CasX or the CasX variants. In one method of the disclosure, a library of polynucleotides encoding the components of the constructs is created and then assembled, as described above. The resulting genes are then assembled, and the resulting genes used to transform a host cell and produce and recover the CasX variants, or the gRNA compositions for evaluation of its properties, as described herein.

[0336] The disclosure provides for the use of plasmid expression vectors containing replication and control sequences that are compatible with and recognized by the host cell and are operably linked to the gene encoding the polypeptide for controlled expression of the polypeptide or transcription of the RNA. Such vector sequences are well known for a variety of bacteria, yeast, and viruses. Useful expression vectors that can be used include, for example, segments of chromosomal, non-chromosomal and synthetic DNA sequences. “Expression vector” refers to a DNA construct containing a DNA sequence that is operably linked to a suitable control sequence capable of effecting the expression of the DNA encoding the polypeptide in a suitable host. The requirements are that the vectors are replicable and viable in the host cell of choice. Low- or high-copy number vectors may be used as desired. The control sequences of the vector include a promoter to effect transcription, an optional operator sequence to control such transcription, a sequence encoding suitable mRNA ribosome binding sites, and sequences that control termination of transcription and translation. In some embodiments, a nucleotide sequence encoding a gRNA is operably linked to a control element, e.g., a transcriptional control element, such as a promoter. In some embodiments, a nucleotide sequence encoding a CasX protein is operably linked to a control element, e.g., a transcriptional control element, such as a promoter. In other cases, the nucleotide encoding the CasX and gRNA are linked and are operably linked to a single control element. The promoter may be any DNA sequence, which shows transcriptional activity in the host cell of choice and may be derived from genes encoding proteins either homologous or heterologous to the host cell. Exemplary regulatory elements include a transcription promoter, a transcription enhancer element, a transcription termination signal, internal ribosome entry site (IRES) or P2A peptide to permit translation of multiple genes from a single transcript, polyadenylation sequences to promote downstream transcriptional termination, sequences for optimization of initiation of translation, and translation termination sequences. In some cases, the promoter is a constitutively active promoter. In some cases, the promoter is a regulatable promoter. In some cases, the promoter is an inducible promoter. In some cases, the promoter is a tissue-specific promoter. In some cases, the promoter is a cell type-specific promoter. In some cases, the transcriptional control element (e.g., the promoter) is functional in a targeted cell type or targeted cell population. For example, in some cases, the transcriptional control element can be functional in eukaryotic cells, e.g., packaging cells for viral or XDP vectors, hematopoietic stem cells (HSC), hematopoietic progenitor cells (HPC), CD34+cells, mesenchymal stem cells (MSC), embryonic stem (ES) cells, induced pluripotent stem cells (iPSC), common myeloid progenitor cells, proerythroblast cells, and erythroblast cells.

[0337] Non-limiting examples of pol II promoters include, but are not limited to EF-1alpha, EF-1alpha core promoter, Jens Tornoe (JeT), promoters from cytomegalovirus (CMV), CMV immediate early (CMVIE), CMV enhancer, herpes simplex virus (HSV) thymidine kinase, early and late simian virus 40 (SV40), the SV40 enhancer, long terminal repeats (LTRs) from retrovirus, mouse metallothionein-I, adenovirus major late promoter (Ad MLP), CMV promoter full-length promoter, the minimal CMV promoter, the chicken CE<-actin promoter (CBA), CBA hybrid (CBh), chicken CE<-actin promoter with cytomegalovirus enhancer (CB7), chicken beta-Actin promoter and rabbit beta-Globin splice acceptor site fusion (CAG), the rous sarcoma virus (RSV) promoter, the HIV-Ltr promoter, the hPGK promoter, the HSV TK promoter, a 7SK promoter, the Mini-TK promoter, the human synapsin I (SYN) promoter which confers neuron-specific expression, beta-actin promoter, super core promoter 1 (SCP1), the Mecp2 promoter for selective expression in neurons, the minimal IL-2 promoter, the Rous sarcoma virus enhancer/promoter (single), the spleen focus-forming virus long terminal repeat (LTR) promoter, the TBG promoter, promoter from the human thyroxine-binding globulin gene (Liver specific), the PGK promoter, the human ubiquitin C promoter (UBC), the UCOE promoter (Promoter of HNRPA2B1-CBX3), the synthetic CAG promoter, the Histone H2 promoter, the Histone H3 promoter, the Ulal small nuclear RNA promoter (226 nt), the Ulal small nuclear RNA promoter (226 nt), the Ulb2 small nuclear RNA promoter (246 nt) 26, the GUSB promoter, the CBh promoter, rhodopsin (Rho) promoter, silencing-prone spleen focus forming virus (SFFV) promoter, a human H1 promoter (H1), a POL1 promoter, the TTR minimal enhancer/promoter, the b-kinesin promoter, mouse mammary tumor virus long terminal repeat (LTR) promoter, the human eukaryotic initiation factor 4A (EIF4A1) promoter, the ROSA26 promoter, the glyceraldehyde 3-phosphate dehydrogenase (GAPDH) promoter, tRNA promoters, and truncated versions and sequence variants of the foregoing. In a particular embodiment, the pol II promoter is EF-1alpha, wherein the promoter enhances transfection efficiency, the transgene transcription or expression of the CRISPR nuclease, the proportion of expression-positive clones and the copy number of the episomal vector in long-term culture.

[0338] Non-limiting examples of pol III promoters include, but are not limited to U6, mini U6, U6 truncated promoters, 7SK, and H1 variants, BiHI (Bidrectional H1 promoter), BiU6, Bi7SK, BiHI (Bidirectional U6, 7SK, and H1 promoters), gorilla U6, rhesus U6, human 7SK, human H1 promoters, and sequence variants thereof. In the foregoing embodiment, the pol III promoter enhances the transcription of the gRNA.

[0339] Selection of the appropriate vector and promoter is well within the level of ordinary skill in the art, as it related to controlling expression, e.g., for modifying a gene. The expression vector may also contain a ribosome binding site for translation initiation and a transcription terminator. The expression vector may also include appropriate sequences for amplifying expression. The expression vector may also include nucleotide sequences encoding protein tags (e.g., 6xHis tag, hemagglutinin tag, fluorescent protein, etc.) that can be fused to the CasX protein, thus resulting in a chimeric CasX protein that are used for purification or detection.

[0340] Recombinant expression vectors of the disclosure can also comprise elements that facilitate robust expression of CasX proteins and the gRNAs of the disclosure. For example, recombinant expression vectors can include one or more of a polyadenylation signal (poly(A)), an intronic sequence or a post-transcriptional regulatory element such as a woodchuck hepatitis post-transcriptional regulatory element (WPRE). Exemplary poly(A) sequences include hGH poly(A) signal (short), HSV TK poly(A) signal, synthetic polyadenylation signals, SV40 poly(A) signal, P-globin poly(A) signal and the like. A person of ordinary skill in the art will be able to select suitable elements to include in the recombinant expression vectors described herein.

[0341] In some embodiments, provided herein are one or more recombinant expression vectors comprising one or more of: (i) a nucleotide sequence of a donor template nucleic acid where the donor template comprises a nucleotide sequence having homology to a sequence of the target locus of the target nucleic acid (e.g., a target genome); (ii) a nucleotide sequence that encodes a gRNA that hybridizes to a target sequence of the locus of the targeted genome (e.g., configured as a single or dual guide RNA) operably linked to a promoter that is operable in a target cell such as a eukaryotic cell; and (iii) a nucleotide sequence encoding a CasX protein operably linked to a promoter that is operable in a target cell such as a eukaryotic cell. In some embodiments, the sequences encoding the donor template, the gRNA and the CasX protein are in different recombinant expression vectors, and in other embodiments one or more polynucleotide sequences (for the donor template, CasX, and the gRNA) are in the same recombinant expression vector.

[0342] The polynucleotide sequence(s) are inserted into the vector by a variety of procedures. In general, DNA is inserted into an appropriate restriction endonuclease site(s) using techniques known in the art. Vector components generally include, but are not limited to, one or more of a signal sequence, an origin of replication, one or more marker genes, an enhancer element, a promoter, and a transcription termination sequence. Construction of suitable vectors containing one or more of these components employs standard ligation techniques which are known to the skilled artisan. Such techniques are well known in the art and well described in the scientific and patent literature. Various vectors are publicly available. The vector may, for example, be in the form of a plasmid, cosmid, viral particle, or phage that may conveniently be subjected to recombinant DNA procedures, and the choice of vector will often depend on the host cell into which it is to be introduced. Thus, the vector may be an autonomously replicating vector, i.e., a vector, which exists as an extrachromosomal entity, the replication of which is independent of chromosomal replication, e.g., a plasmid. Alternatively, the vector may be one which, when introduced into a host cell, is integrated into the host cell genome and replicated together with the chromosome(s) into which it has been integrated. Once introduced into a suitable host cell, expression of the protein involved in antigen processing, antigen presentation, antigen recognition, and/or antigen response can be determined using any nucleic acid or protein assay known in the art. For example, the presence of transcribed mRNA of reference CasX or the CasX variants can be detected and/or quantified by conventional hybridization assays (e.g., Northern blot analysis), amplification procedures (e.g. RT-PCR), SAGE (U.S. Pat. No. 5,695,937), and array-based technologies (see e.g., U.S. Pat. Nos. 5,405,783, 5,412,087 and 5,445,934), using probes complementary to any region of the polynucleotide.

[0343] The polynucleotides and recombinant expression vectors can be delivered to the target host cells by a variety of methods. Such methods include, but are not limited to, viral infection, transfection, lipofection, electroporation, calcium phosphate precipitation, polyethyleneimine (PEI)-mediated transfection, DEAE-dextran mediated transfection, microinjection, liposome-mediated transfection, particle gun technology, nucleofection, direct addition by cell penetrating CasX proteins that are fused to or recruit donor DNA, cell squeezing, calcium phosphate precipitation, direct microinjection, nanoparticle-mediated nucleic acid delivery, and using the commercially available TransMessenger® reagents from Qiagen, Stemfect™ RNA Transfection Kit from Stemgent, and TransIT®-mRNA Transfection Kit from Mirus Bio LLC, Lonza nucleofection, Maxagen electroporation and the like.

[0344] A recombinant expression vector sequence can be packaged into a virus or virus-like particle (also referred to herein as a “particle” or “virion”) for subsequent infection and transformation of a cell, ex vivo, in vitro or in vivo. Such particles or virions will typically include proteins that encapsidate or package the vector genome. Suitable expression vectors may include viral expression vectors based on vaccinia virus; poliovirus; adenovirus; a retroviral vector (e.g., Murine Leukemia Virus), spleen necrosis virus, and vectors derived from retroviruses such as Rous Sarcoma Virus, Harvey Sarcoma Virus, avian leukosis virus, a lentivirus, human immunodeficiency virus, myeloproliferative sarcoma virus, and mammary tumor virus; and the like. In some embodiments, a recombinant expression vector of the present disclosure is a recombinant adeno-associated virus (AAV) vector. In some embodiments, a recombinant expression vector of the present disclosure is a recombinant lentivirus vector. In some embodiments, a recombinant expression vector of the present disclosure is a recombinant retroviral vector.

[0345] In some embodiments, a recombinant expression vector of the present disclosure is a recombinant adeno-associated virus (AAV) vector. In some embodiments, a recombinant expression vector of the present disclosure is a recombinant lentivirus vector. In some embodiments, a recombinant expression vector of the present disclosure is a recombinant retroviral vector.

[0346] AAV is a small (20 nm), nonpathogenic virus that is useful in treating human diseases in situations that employ a viral vector for delivery to a cell such as a eukaryotic cell, either in vivo or ex vivo for cells to be prepared for administering to a subject. A construct is generated, for example a construct encoding any of the CasX proteins and/or CasX gRNA embodiments as described herein, and is flanked with AAV inverted terminal repeat (ITR) sequences, thereby enabling packaging of the AAV vector into an AAV viral particle.

[0347] An “AAV” vector may refer to the naturally occurring wild-type virus itself or derivatives thereof. The term covers all subtypes, serotypes and pseudotypes, and both naturally occurring and recombinant forms, except where required otherwise. As used herein, the term “serotype” refers to an AAV which is identified by and distinguished from other AAVs based on capsid protein reactivity with defined antisera, e.g., there are many known serotypes of primate AAVs. In some embodiments, the AAV vector is selected from AAV1, AAV2, AAV3, AAV4, AAV5, AAV6, AAV7, AAV8, AAV9, AAV10, AAV11, AAV12, AAV 44.9, AAV-Rh74 (Rhesus macaque-derived AAV), and AAVRh10, and modified capsids of these serotypes. For example, serotype AAV-2 is used to refer to an AAV which contains capsid proteins encoded from the cap gene of AAV-2 and a genome containing 5′ and 3′ ITR sequences from the same AAV-2 serotype. Pseudotyped AAV refers to an AAV that contains capsid proteins from one serotype and a viral genome including 5′-3′ ITRs of a second serotype. Pseudotyped rAAV would be expected to have cell surface binding properties of the capsid serotype and genetic properties consistent with the ITR serotype. Pseudotyped recombinant AAV (rAAV) are produced using standard techniques described in the art. As used herein, for example, rAAV1 may be used to refer an AAV having both capsid proteins and 5′-3′ ITRs from the same serotype or it may refer to an AAV having capsid proteins from serotype 1 and 5′-3′ ITRs from a different AAV serotype, e.g., AAV serotype 2. For each example illustrated herein the description of the vector design and production describes the serotype of the capsid and 5′-3′ ITR sequences.

[0348] An “AAV virus” or “AAV viral particle” refers to a viral particle composed of at least one AAV capsid protein (preferably by all of the capsid proteins of a wild-type AAV) and an encapsidated polynucleotide. If the particle additionally comprises a heterologous polynucleotide (i.e., a polynucleotide other than a wild-type AAV genome to be delivered to a mammalian cell), it is typically referred to as “rAAV”. An exemplary heterologous polynucleotide is a polynucleotide comprising a CasX protein and/or sgRNA and, optionally, a donor template of any of the embodiments described herein.

[0349] By “adeno-associated virus inverted terminal repeats” or “AAV ITRs” is meant the art recognized regions found at each end of the AAV genome which function together in cis as origins of DNA replication and as packaging signals for the virus. AAV ITRs, together with the AAV rep coding region, provide for the efficient excision and rescue from, and integration of a nucleotide sequence interposed between two flanking ITRs into a mammalian cell genome.

[0350] The nucleotide sequences of AAV ITR regions are known. See, for example Kotin, R.M. (1994) Human Gene Therapy 5:793-801; Berns, K. I. “Parvoviridae and their Replication” in Fundamental Virology, 2^{nd} Edition, (B. N. Fields and D. M. Knipe, eds.). As used herein, an AAV ITR need not have the wild-type nucleotide sequence depicted, but may be altered, e.g., by the insertion, deletion or substitution of nucleotides. Additionally, the AAV ITR may be derived from any of several AAV serotypes, including without limitation, AAV1, AAV2, AAV3, AAV4, AAV5, AAV6, AAV7, AAV8, AAV9, AAV10, AAV-Rh74, and AAVRh10, and modified capsids of these serotypes. Furthermore, 5′ and 3′ ITRs which flank a selected nucleotide sequence in an AAV vector need not necessarily be identical or derived from the same AAV serotype or isolate, so long as they function as intended, i.e., to allow for excision and rescue of the sequence of interest from a host cell genome or vector, and to allow integration of the heterologous sequence into the recipient cell genome when AAV Rep gene products are present in the cell. Use of AAV serotypes for integration of heterologous sequences into a host cell is known in the art (see, e.g., WO2018195555A1 and US20180258424A1, incorporated by reference herein.)

[0351] By “AAV rep coding region” is meant the region of the AAV genome which encodes the replication proteins Rep 78, Rep 68, Rep 52 and Rep 40. These Rep expression products have been shown to possess many functions, including recognition, binding and nicking of the AAV origin of DNA replication, DNA helicase activity and modulation of transcription from AAV (or other heterologous) promoters. The Rep expression products are collectively required for replicating the AAV genome. By “AAV cap coding region” is meant the region of the AAV genome which encodes the capsid proteins VP1, VP2, and VP3, or functional homologues thereof. These Cap expression products supply the packaging functions which are collectively required for packaging the viral genome.

[0352] In some embodiments, AAV capsids utilized for delivery of the encoding sequences for the CasX and gRNA, and, optionally, the DMPK donor template nucleotides to a host cell can be derived from any of several AAV serotypes, including without limitation, AAV1, AAV2, AAV3, AAV4, AAV5, AAV6, AAV7, AAV8, AAV9, AAV10, AAV11, AAV12, AAV 44.9, AAV-Rh74 (Rhesus macaque-derived AAV), and AAVRh10, and the AAV ITRs are derived from AAV serotype 2. In a particular embodiment, AAV1, AAV7, AAV6, AAV8, or AAV9 are utilized for delivery of the CasX, gRNA, and, optionally, donor template nucleotides, to a host muscle cell.

[0353] In order to produce rAAV viral particles, an AAV expression vector is introduced into a suitable host cell using known techniques, such as by transfection. Packaging cells are typically used to form virus particles; such cells include HEK293 cells (and other cells known in the art), which package adenovirus. A number of transfection techniques are generally known in the art; see, e.g., Sambrook et al. (1989) Molecular Cloning, a laboratory manual, Cold Spring Harbor Laboratories, New York. Particularly suitable transfection methods include calcium phosphate co-precipitation, direct microinjection into cultured cells, electroporation, liposome mediated gene transfer, lipid-mediated transduction, and nucleic acid delivery using high-velocity microprojectiles.

[0354] In an advantage of rAAV constructs of the present disclosure, the smaller size of the Class 2, Type V CRISPR nucleases; e.g., the CasX variants of the embodiments, permits the inclusion of all the necessary editing and ancillary expression components into the transgene such that a single rAAV particle can deliver and transduce these components into a target cell in a form that results in the expression of the CRISPR nuclease and gRNA that are capable of effectively modifying the target nucleic acid of the target cell. A representative schematic of such a construct is presented in FIG. 13. This stands in marked contrast to other CRISPR systems, such as Cas9, where typically a two-particle system is employed to deliver the necessary editing components to a target cell. Thus, in some embodiments of the rAAV systems, the disclosure provides; i) a first plasmid comprising the ITRs, sequences encoding the CasX variant, sequences encoding one or more gRNA, a first promoter operably linked to the CasX and a second promoter operably linked to the gRNA, and, optionally, one or more enhancer elements; ii) a second plasmid comprising the rep and cap genes; and iii) a third plasmid comprising helper genes, wherein upon transfection of an appropriate packaging cell, the cell is capable of producing an rAAV having the ability to deliver to a target cell, in a single particle, sequences capable of expressing the CasX nuclease and gRNA having the ability to edit the target nucleic acid of the target cell. In some embodiments of the rAAV systems, the sequence encoding the CRISPR protein and the sequence encoding the at least first gRNA are less than about 3100, less than about 3090, less than about 3080, less than about 3070, less than about 3060, less than about 3050, or less than about 3040 nucleotides in length, such that the sequences encoding the first and second promoter and, optionally, one or more enhance elements can have at least about 1300, at least about 1350, at least about 1360, at least about 1370, at least about 1380, at least about 1390, at least about 1400, at least about 1500, at least about 1600 nucleotides, at least 1650, at least about 1700, at least about 1750, at least about 1800, at least about 1850, or at least about 1900 nucleotides in combined length. In some embodiments of the rAAV systems, the sequence encoding the first promoter and the at least one accessory element have greater than at least about 1300, at least about 1350, at least about 1360, at least about 1370, at least about 1380, at least about 1390, at least about 1400, at least about 1500, at least about 1600 nucleotides, at least 1650, at least about 1700, at least about 1750, at least about 1800, at least about 1850, or at least about 1900 nucleotides in combined length. In some embodiments of the rAAV systems, the sequence encoding the first and second promoters and the at least one accessory element have greater than at least about 1300, at least about 1350, at least about 1360, at least about 1370, at least about 1380, at least about 1390, at least about 1400, at least about 1500, at least about 1600 nucleotides, at least 1650, at least about 1700, at least about 1750, at least about 1800, at least about 1850, or at least about 1900 nucleotides in combined length.

[0355] In some embodiments, host cells transfected with the above-described AAV expression vectors are rendered capable of providing AAV helper functions in order to replicate and encapsidate the nucleotide sequences flanked by the AAV ITRs to produce rAAV viral particles. AAV helper functions are generally AAV-derived coding sequences which can be expressed to provide AAV gene products that, in turn, function in trans for productive AAV replication. AAV helper functions are used herein to complement necessary AAV functions that are missing from the AAV expression vectors. Thus, AAV helper functions include one, or both of the major AAV ORFs (open reading frames), encoding the rep and cap coding regions, or functional homologues thereof. Accessory functions can be introduced into and then expressed in host cells using methods known to those of skill in the art. Commonly, accessory functions are provided by infection of the host cells with an unrelated helper virus. In some embodiments, accessory functions are provided using an accessory function vector. Depending on the host/vector system utilized, any of a number of suitable transcription and translation control elements, including constitutive and inducible promoters, transcription enhancer elements, transcription terminators, etc., may be used in the expression vector. In some embodiments, the disclosure provides host cells comprising the AAV vectors of the embodiments disclosed herein.

[0356] In other embodiments, suitable vectors may include virus-like particles (VLP). Virus-like particles (VLPs) are particles that closely resemble viruses, but do not contain viral genetic material and are therefore non-infectious. In some embodiments, VLPs comprise a polynucleotide encoding a transgene of interest, for example any of the CasX protein and/or a gRNA embodiments, and, optionally, donor template polynucleotides described herein, packaged with one or more viral structural proteins.

[0357] In other embodiments, the disclosure provides CasX delivery particles (XDPs) produced in vitro that comprise a CasX:gRNA RNP complex and, optionally, a donor template. Combinations of structural proteins from different viruses can be used to create XDPs, including components from virus families including Parvoviridae (e.g., adeno-associated virus), Retroviridae (e.g., alpharetrovirus, a betaretrovirus, a gammaretrovirus, a deltaretrovirus, a epsilonretrovirus, or a lentivirus), Flaviviridae (e.g., Hepatitis C virus), Paramyxoviridae (e.g., Nipah) and bacteriophages (e.g., QP, AP205). In some embodiments, the disclosure provides XDP systems designed using components of retrovirus, including lentiviruses (such as HIV) and alpharetrovirus, betaretrovirus, gammaretrovirus, deltaretrovirus, epsilonretrovirus, in which individual plasmids comprising polynucleotides encoding the various components are introduced into a packaging cell that, in turn, produce the XDP. In some embodiments, the disclosure provides XDP comprising one or more components of i) protease, ii) a protease cleavage site, iii) one or more components of a Gag polyprotein selected from a matrix protein (MA), a nucleocapsid protein (NC), a capsid protein (CA), a p1 peptide, a p6 peptide, a P2A peptide, a P2B peptide, a P10 peptide, a p12 peptide, a PP21/24 peptide, a P12/P3/P8 peptide, and a P20 peptide; v) CasX; vi) gRNA, and vi) targeting glycoproteins or antibody fragments wherein the resulting XDP particle encapsidates a CasX:gRNA RNP. The polynucleotides encoding the Gag, CasX and gRNA can further comprise paired components designed to assist the trafficking of the components out of the nucleus of the host cell and facilitate recruitment of the complexed CasX:gRNA into the budding XDP. Non-limiting examples of such components include hairpin RNA such as MS2 hairpin, PP7 hairpin, QP hairpin, and U1 hairpin II incorporated into the gRNA as binding partners that have binding affinity for the packaging recruiter MS2 coat protein, PP7 coat protein, Q$ coat protein, and U1A signal recognition particle, respectively, that are fused to the Gag polyprotein. It has been discovered that the incorporation of the binding partner inserted into the guide RNA and the packaging recruiter into the nucleic acid comprising the Gag polypeptide facilitates the packaging of the XDP particle due, in part, to the affinity of the CasX for the gRNA, resulting in an RNP, such that both the gRNA and CasX are associated with Gag during the encapsidation process of the XDP, increasing the proportion of XDP comprising RNP compared to a construct lacking the binding partner and packaging recruiter. In other embodiments, the gRNA can comprise Rev response element (RRE) or portions thereof that have binding affinity to Rev, which can be linked to the Gag polyprotein. In other embodiments, the gRNA can comprise one or more RRE and one or more MS2 hairpin sequences. The RRE can be selected from the group consisting of Stem IIB of Rev response element (RRE), Stem II-V of RRE, Stem II of RRE, Rev-binding element (RBE) of Stem IIB, and full-length RRE. In the foregoing embodiment, the components include sequences of UGGGCGCAGCGUCAAUGACGCUGACGGUACA (Stem IIB, SEQ ID NO: 1280), GCACUAUGGGCGCAGCGUCAAUGACGCUGACGGUACAGGCCAGACAAUUAUUGU CUGGUAUAGUGC (Stem II, SEQ ID NO: 1281), CAGGAAGCACUAUGGGCGCAGCGUCAAUGACGCUGACGGUACAGGCCAGACAAU UAUUGUCUGGUAUAGUGCAGCAGCAGAACAAUUUGCUGAGGGCUAUUGAGGCGC AACAGCAUCUGUUGCAACUCACAGUCUGGGGCAUCAAGCAGCUCCAGGCAAGAA UCCUG (Stem II-V, SEQ ID NO: 1282), GCUGACGGUACAGGC (RBE, SEQ ID NO: 1284), and AGGAGCUUUGUUCCUUGGGUUCUUGGGAGCAGCAGGAAGCACUAUGGGCGCAGC GUCAAUGACGCUGACGGUACAGGCCAGACAAUUAUUGUCUGGUAUAGUGCAGCA GCAGAACAAUUUGCUGAGGGCUAUUGAGGCGCAACAGCAUCUGUUGCAACUCAC AGUCUGGGGCAUCAAGCAGCUCCAGGCAAGAAUCCUGGCUGUGGAAAGAUACCU AAAGGAUCAACAGCUCCU (full-length RRE, SEQ ID NO: 1283). In other embodiments, the gRNA can comprise one or more RRE and one or more MS2 hairpin sequences. In a particular embodiment, the gRNA comprises an MS2 hairpin variant that is optimized to increase the binding affinity to the MS2 coat protein, thereby enhancing the incorporation of the gRNA and associated CasX into the budding XDP. In some embodiments, gRNA variants comprising MS2 hairpin variants and RRE include gRNA variants 275-315 (SEQ ID NOS: 2353-2393), comprising MS2 sequences as set forth in Table 36. In some embodiments, the disclosure provides gRNA variants comprising one or more MS2 hairpin sequence variants, wherein the variant exhibits a K_{D} to its MS2 coat protein ligand of less than 100 nM, less than 50 nM, less than 35 nM, less than 10 nM, less than 3 nM, or less than 2 nM and the XDP comprising the gRNA variant exhibits improved editing activity towards a target nucleic acid in an in vitro cellular assay, wherein the EC₅0 is less than 10⁸, or less than 10⁷, or less than 10⁶ particles to achieve editing in 50% of the cells. The targeting glycoproteins or antibody fragments on the surface that provides tropism of the XDP to the target cell, wherein upon administration and entry into the target cell, the RNP molecule is free to be transported into the nucleus of the cell. The envelope glycoprotein can be derived from any enveloped viruses known in the art to confer tropism to XDP, including but not limited to the group consisting of Argentine hemorrhagic fever virus, Australian bat virus, Autographa californica multiple nucleopolyhedrovirus, Avian leukosis virus, baboon endogenous virus, Bolivian hemorrhagic fever virus, Borna disease virus, Breda virus, Bunyamwera virus, Chandipura virus, Chikungunya virus, Crimean-Congo hemorrhagic fever virus, Dengue fever virus, Duvenhage virus, Eastern equine encephalitis virus, Ebola hemorrhagic fever virus, Ebola Zaire virus, enteric adenovirus, Ephemerovirus, Epstein-Bar virus (EBV), European bat virus 1, European bat virus 2, Fug Synthetic gP Fusion, Gibbon ape leukemia virus, Hantavirus, Hendra virus, hepatitis A virus, hepatitis B virus, hepatitis C virus, hepatitis D virus, hepatitis E virus, hepatitis G Virus (GB virus C), herpes simplex virus type 1, herpes simplex virus type 2, human cytomegalovirus (HHV5), human foamy virus, human herpesvirus (HHV), human Herpesvirus 7, human herpesvirus type 6, human herpesvirus type 8, human immunodeficiency virus 1 (HIV-1), human metapneumovirus, human T-lymphotro pic virus 1, influenza A, influenza B, influenza C virus, Japanese encephalitis virus, Kaposi's sarcoma-associated herpesvirus (HHV8), Kaysanur Forest disease virus, La Crosse virus, Lagos bat virus, Lassa fever virus, lymphocytic choriomeningitis virus (LCMV), Machupo virus, Marburg hemorrhagic fever virus, measles virus, Middle eastern respiratory syndrome-related coronavirus, Mokola virus, Moloney murine leukemia virus, monkey pox, mouse mammary tumor virus, mumps virus, murine gammaherpesvirus, Newcastle disease virus, Nipah virus, Nipah virus, Norwalk virus, Omsk hemorrhagic fever virus, papilloma virus, parvovirus, pseudorabies virus, Quaranfil virus, rabies virus, RD114 Endogenous Feline Retrovirus, respiratory syncytial virus (RSV), Rift Valley fever virus, Ross River virus, rRotavirus, Rous sarcoma virus, rubella virus, Sabia-associated hemorrhagic fever virus, SARS-associated coronavirus (SARS-CoV), Sendai virus, Tacaribe virus, Thogotovirus, tick-borne encephalitis causing virus, varicella zoster virus (HHV3), varicella zoster virus (HHV3), variola major virus, variola minor virus, Venezuelan equine encephalitis virus, Venezuelan hemorrhagic fever virus, vesicular stomatitis virus (VSV), VSV-G, Vesiculovirus, West Nile virus, western equine encephalitis virus, and Zika Virus.

[0358] In other embodiments, the disclosure provides XDP of the foregoing and further comprises one or more components of a pol polyprotein (e.g., a protease), and, optionally, a second CasX or a donor template. The disclosure contemplates multiple configurations of the arrangement of the encoded components, including duplicates of some of the encoded components. The foregoing offers advantages over other vectors in the art in that viral transduction to dividing and non-dividing cells is efficient and that the XDP delivers potent and short-lived RNP that escape a subject's immune surveillance mechanisms that would otherwise detect a foreign protein. Non-limiting, exemplary XDP systems are described in PCT/US20/63488 and WO2021113772A1, incorporated by reference herein. In some embodiments, the disclosure provides host cells comprising polynucleotides or vectors encoding any of the foregoing XDP embodiments.

[0359] Upon production and recovery of the XDP comprising the CasX:gRNA RNP of any of the embodiments described herein, the XDP can be used in methods to edit target cells of subjects by the administering of such XDP, as described more fully, below.

[0360] For non-viral delivery, vectors can also be delivered wherein the vector or vectors encoding the CasX variants and gRNA are formulated in nanoparticles, wherein the nanoparticles contemplated include, but are not limited to nanospheres, liposomes, lipid nanoparticles, quantum dots, polyethylene glycol particles, hydrogels, and micelles. Lipid nanoparticles are generally composed of an ionizable cationic lipid and three or more additional components, such as cholesterol, DOPE, polylactic acid-co-glycolic acid, and a polyethylene glycol (PEG) containing lipid. In some embodiments, the CasX variants of the embodiments disclosed herein are formulated in a lipid nanoparticle. In some embodiments, the lipid nanoparticle comprises the gRNA of the embodiments disclosed herein. In some embodiments, the lipid nanoparticle comprises RNP of the CasX variant complexed with the gRNA. In some embodiments, the system comprises a lipid nanoparticle comprising nucleic acids encoding the CasX variants and the gRNA and, optionally, a donor template nucleic acid. In some embodiments, the components of the CasX:gRNA system are formulated in separate lipid nanoparticles for delivery to cells or for administration to a subject in need thereof.

### VII. Methods for Modification of a Target Nucleic Acid

[0361] The CRISPR proteins, guides, nucleic acids, and variants thereof provided herein, as well as vectors encoding such components, are useful for various applications, including therapeutics, diagnostics, and research.

[0362] In some embodiments, to effect the methods of the disclosure for gene editing and modification of a target nucleic acid in a cell, provided herein are programmable Class 2, Type V CasX variant and gRNA variant editing pairs (CasX:gRNA). The programmable nature of the pairs provided herein allows for the precise targeting to achieve the desired modification at one or more regions of predetermined interest in the gene target nucleic acid. A variety of strategies and methods can be employed to modify the target nucleic acid sequence in a cell using the systems provided herein. As used herein “modifying” includes, but is not limited to, cleaving, nicking, editing, deleting, knocking out, knocking down, mutating, correcting, exon-skipping and the like. As described herein, a CasX variant introducing double-stranded cleavage of the target nucleic acid generates a double-stranded break within 18-26 nucleotides 5′ of a PAM site on the target strand and 10-18 nucleotides 3′ on the non-target strand. The resulting modification can result in random insertions or deletions (indels), or a substitution, duplication, frame-shift, or inversion of one or more nucleotides in those regions by non-homologous DNA end joining (NHEJ) repair mechanisms.

[0363] In some embodiments, the disclosure provides methods of modifying a target nucleic acid in a cell, the method comprising contacting the target nucleic acid of the cell with: i) a Class 2, Type V CRISPR protein and gRNA (CasX:gRNA) editing pair comprising a CasX variant and a gRNA variant of any one of the embodiments described herein; ii) a CasX:gRNA editing pair together with a donor template of any one of the embodiments described herein; iii) a nucleic acid encoding the CasX and the gRNA editing pair, and optionally comprising the donor template; iv) a vector comprising the nucleic acid of (iii), above; v) an XDP comprising the CasX:gRNA editing pair of any one of the embodiments described herein; or vi) combinations of two or more of (i) to (v), wherein the contacting of the target nucleic acid with a CasX protein and gRNA gene editing pair and, optionally, the donor template, modifies the target nucleic acid. In some cases, the modification results in a correction or compensation of a mutation in a cell, thereby creating an edited cell such that expression of a functional gene product can occur. In other embodiments of the method, the modification comprises suppressing or eliminating expression of the gene product by a knock-down or knock-out of the gene.

[0364] In some embodiments of the method of modifying a target nucleic acid sequence in a cell, wherein the method comprises contacting the target nucleic acid of the cell with a CasX:gRNA editing pair, wherein the editing pair comprises a CasX variant selected from the group consisting of SEQ ID NOS: 247-592 and 1147-1231 as set forth in Table 3, a CasX variant selected from the group consisting of SEQ ID NOS: 270-592 and 1147-1231, a CasX variant selected from the group consisting of SEQ ID NOS: 415-592 and 1147-1231, or a variant sequence at least 60% identical, at least 70% identical, at least 80% identical, at least 81% identical, at least 82% identical, at least 83% identical, at least 84% identical, at least 85% identical, at least 86% identical, at least 86% identical, at least 87% identical, at least 88% identical, at least 89% identical, at least 89% identical, at least 90% identical, at least 91% identical, at least 92% identical, at least 93% identical, at least 94% identical, at least 95% identical, at least 96% identical, at least 97% identical, at least 98% identical, at least 99% identical, or at least 99.5% identical thereto, the gRNA scaffold comprises a sequence selected from the group consisting of SEQ ID NOS: 2101-2332 and 2353-2398 as set forth in Table 2, the gRNA scaffold comprises a sequence selected from the group consisting of SEQ ID NOS: 2238-2332 and 2353-2398, the RNA scaffold comprises a sequence selected from the group consisting of SEQ ID NOS: 2281-2332 and 2353-2398, or a sequence at least 65% identical, at least 70% identical, at least 75% identical, at least 80% identical, at least 81% identical, at least 82% identical, at least 83% identical, at least 84% identical, at least 85% identical, at least 86% identical, at least 86% identical, at least 87% identical, at least 88% identical, at least 89% identical, at least 89% identical, at least 90% identical, at least 91% identical, at least 92% identical, at least 93% identical, at least 94% identical, at least 95% identical, at least 96% identical, at least 97% identical, at least 98% identical, at least 99% identical, at least 99.5% identical thereto, and the gRNA comprises a targeting sequence that is complementary to the target nucleic acid and is capable of hybridizing with the target nucleic acid.

[0365] In some embodiments, the CasX:gRNA gene editing pair are capable of associating together in a ribonuclear protein complex (RNP). In some embodiments, the CasX:gRNA gene editing pair are associated together in a ribonuclear protein complex (RNP). In some embodiments, the RNP is capable of binding and generating a double-stranded break in the target nucleic acid that results in a permanent indel or mutation in the target nucleic acid. In other embodiments, the RNP is capable of binding a target nucleic acid and generating one or more single-stranded nicks in the target nucleic acid that results in a permanent indel or mutation in the target nucleic acid. In other embodiments, the RNP is capable of binding a target nucleic acid but is not capable of cleaving the target nucleic acid; i.e., contains a dCasX variant. In some embodiments of the method, the CasX variant protein may be provided to cells as a polypeptide that may optionally be fused to a polypeptide domain that increases solubility of the product. The domain may be linked to the polypeptide through a defined protease cleavage site; e.g. a TEV sequence, which is cleaved by TEV protease. The linker may also include one or more flexible sequences; e.g. from 1 to 10 glycine residues. In some embodiments, the cleavage of the fusion protein is performed in a buffer that maintains solubility of the product; e.g. in the presence of from 0.5 to 2 M urea, in the presence of polypeptides and/or polynucleotides that increase solubility, and the like. Domains of interest may include endosomolytic domains; e.g. influenza HA domain; and other polypeptides that aid in production, e.g. IF2 domain, GST domain, GRPE domain, and the like. The polypeptide may be formulated for improved stability. For example, the peptides may be PEGylated, where the polyethyleneoxy group provides for enhanced lifetime in the blood stream.

[0366] In other embodiments of the method of modifying a target nucleic acid sequence in a cell, the method comprises contacting the target nucleic acid sequence with a plurality of RNPs with a first and a second, or a plurality of gRNAs targeted to different or overlapping portions of the gene wherein the CasX protein introduces multiple breaks in the target nucleic acid that result in permanent indels or mutations in the target nucleic acid, as described herein, or an excision of the intervening sequence between the breaks with a corresponding modulation of expression or alteration in the function of the gene product, thereby creating a modified cell.

[0367] In some embodiments, the method of modifying a target nucleic acid comprises contacting a target nucleic acid with a CasX:gRNA gene editing pair as described herein and a donor template. Thus, in some cases, a method as provided herein includes contacting the target nucleic acid with a donor polynucleotide (e.g., by introducing the donor polynucleotide into a cell), wherein the donor polynucleotide, a portion of the donor polynucleotide, a copy of the donor polynucleotide, or a portion of a copy of the donor polynucleotide is integrated into the target nucleic acid. For example, an exogenous donor template may comprise a corrective sequence to be integrated flanked by an upstream sequence and a downstream sequence that is introduced into the target nucleic acid sequence in a cell. In other cases, the donor template may contain one or more single base changes, insertions, deletions, inversions or rearrangements with respect to the genomic sequence, provided that there is sufficient homology with the target nucleic acid sequence to support its integration into the target nucleic acid, which can result in a frame-shift or other mutation, or a replacement of that portion of the target nucleic acid sequence, with a corresponding knock-down or knock-out of the defective gene in a cell. The upstream and downstream sequences relative to the cleavage site(s) share sequence similarity with either side of the site of integration in the target nucleic acid (i.e., homologous arms), facilitating the insertion. In other cases, an exogenous donor template is inserted between the ends generated by CasX cleavage by homology-independent targeted integration (HITI) mechanisms. The exogenous sequence inserted by HITI can be any length, for example, a relatively short sequence of between 10 and 50 nucleotides in length, or a longer sequence of about 50-1000 nucleotides in length. The lack of homology can be, for example, having no more than 20-50% sequence identity and/or lacking in specific hybridization at low stringency. In other cases, the lack of homology can further include a criterion of having no more than 5, 6, 7, 8, or 9 bp identity. In some embodiments, the donor template polynucleotide comprises at least about 10, at least about 50, at least about 100, or at least about 200, or at least about 300, or at least about 400, or at least about 500, or at least about 600, or at least about 700, or at least about 800, or at least about 900, or at least about 1000, or at least about 10,000, or at least about 15,000 nucleotides. In other embodiments, the donor template comprises at least about 10 to about 15,000 nucleotides, or at least about 100 to about 10,000 nucleotides, or at least about 400 to about 8,000 nucleotides, or at least about 600 to about 5000 nucleotides, or at least about 1000 to about 2000 nucleotides. In some embodiments, the donor template is a single stranded DNA template or a single stranded RNA template. In other embodiments, the donor template is a double stranded DNA template. The donor template sequence may comprise certain sequence differences as compared to the genomic sequence, e.g., restriction sites, nucleotide polymorphisms, selectable markers (e.g., drug resistance genes, fluorescent proteins, enzymes etc.), etc., which may be used to assess for successful insertion of the donor nucleic acid at the cleavage site or in some cases may be used for other purposes (e.g., to signify expression at the targeted genomic locus). Alternatively, these sequence differences may include flanking recombination sequences such as FLPs, loxP sequences, or the like.

[0368] In some embodiments, the disclosure provides methods of modifying a target nucleic acid sequence of a cell, comprising contacting the target nucleic acid of said cell with one or more polynucleotides of any of the embodiments described herein, wherin the polynucleotide(s) encode a CasX:gRNA gene editing pair, wherein the gRNA comprises a targeting sequence complementary to, and therefore capable of hybridizing with, the target nucleic acid sequence, and wherein the contacting results in modification of the target nucleic acid. Methods of introducing a nucleic acid (e.g., a nucleic acid comprising a donor polynucleotide sequence, one or more nucleic acids encoding a CasX variant protein and a gRNA variant as described herein) into a cell are known in the art, and any convenient method can be used. Suitable methods include viral infection, transfection, lipofection, electroporation, calcium phosphate precipitation, polyethyleneimine (PEI)-mediated transfection, DEAE-dextran mediated transfection, liposome-mediated transfection, particle gun technology, nucleofection, electroporation, direct addition by cell-penetrating CasX proteins that are fused to or recruit donor DNA, cell squeezing, calcium phosphate precipitation, direct microinjection, and nanoparticle-mediated nucleic acid delivery. Nucleic acids may be provided to the cells using well-developed transfection techniques, and the commercially available TransMessenger® reagents from Qiagen, Stemfect™ RNA Transfection Kit from Stemgent, and TransIT@-mRNA Transfection Kit from Mirus Bio LLC, Lonza nucleofection, Maxagen electroporation and the like. A nucleic acid comprising a nucleotide sequence encoding a CasX variant protein is in some cases an RNA. Thus, in some embodiments a CasX variant protein can be introduced into cells as RNA. Methods of introducing RNA into cells are known in the art and may include, for example, direct injection, transfection, or any other method used for the introduction of DNA.

[0369] In other embodiments, the disclosure provides methods of modifying a target nucleic acid sequence of a cell, comprising contacting said cell with a vector of any of the embodiments described herein comprising a nucleic acid encoding a CasX:gRNA gene editing pair comprising a CasX variant protein and a gRNA variant of any of the embodiments described herein and, optionally, a donor template, wherein the gRNA comprises a targeting sequence complementary to, and therefore capable of hybridizing with, the target nucleic acid sequence, wherein the contacting results in modification of the target nucleic acid. Introducing recombinant expression vectors into cells can occur in any suitable culture media and under any suitable culture conditions that promote the survival of the cells. Introducing recombinant expression vectors into a target cell can be carried out in vivo, in vitro or ex vivo.

[0370] In some embodiments, vectors may be provided directly to a target host cell. For example, cells may be contacted with vectors comprising the subject nucleic acids (e.g., recombinant expression vectors having the donor template sequence and encoding the gRNA variant and the CasX variant protein) such that the vectors are taken up by the cells. Methods for contacting cells with nucleic acid vectors that are plasmids include electroporation, calcium chloride transfection, microinjection, and lipofection are well known in the art. For viral vector delivery, cells can be contacted with viral particles comprising the subject viral expression vectors; e.g., the vectors are viral particles such as AAV or VLP that comprise polynucleotides that encode the CasX:gRNA components. For non-viral delivery, vectors or the CasX:gRNA components can also be formulated for delivery in lipid nanoparticles, wherein the lipid nanoparticles contemplated include, but are not limited to nanospheres, liposomes, quantum dots, polyethylene glycol particles, hydrogels, and micelles.

[0371] In some embodiments, the editing of the target nucleic acid occurs in vitro, inside of a cell, for example in a cell culture system. In some embodiments, the editing occurs in vivo inside of a cell of a subject, for example in a cell in an animal. In some embodiments, the cell is a eukaryotic cell. Exemplary eukaryotic cells may include cells selected from the group consisting of a mouse cell, a rat cell, a pig cell, a dog cell, and a non-human primate cell. In some embodiments, the cell is a human cell. Non-limiting examples of cells include an embryonic stem cell, an induced pluripotent stem cell, a germ cell, a fibroblast, an oligodendrocyte, a glial cell, a hematopoietic stem cell, a neuron progenitor cell, a neuron, a muscle cell, a bone cell, a hepatocyte, a pancreatic cell, a retinal cell, a cancer cell, a T-cell, a B-cell, an NK cell, a fetal cardiomyocyte, a myofibroblast, a mesenchymal stem cell, an autotransplanted expanded cardiomyocyte, an adipocyte, a totipotent cell, a pluripotent cell, a blood stem cell, a myoblast, an adult stem cell, a bone marrow cell, a mesenchymal cell, a parenchymal cell, an epithelial cell, an endothelial cell, a mesothelial cell, fibroblasts, osteoblasts, chondrocytes, exogenous cell, endogenous cell, stem cell, hematopoietic stem cell, bone-marrow derived progenitor cell, myocardial cell, skeletal cell, fetal cell, undifferentiated cell, multi-potent progenitor cell, unipotent progenitor cell, a monocyte, a cardiac myoblast, a skeletal myoblast, a macrophage, a capillary endothelial cell, a xenogenic cell, an allogenic cell, or a post-natal stem cell. In alternative embodiments, the cell is a prokaryotic cell.

[0372] In some embodiments of the methods of modifying a target nucleic acid of a cell in vitro or ex vivo, to induce cleavage or any desired modification to a target nucleic acid, the gRNA variant and the CasX variant protein of the present disclosure and, optionally, the donor template sequence, whether they be introduced as nucleic acids or polypeptides, complexed RNP, vectors or XDP, are provided to the cells for about 30 minutes to about 24 hours, or at least about 1 hour, 1.5 hours, 2 hours, 2.5 hours, 3 hours, 3.5 hours 4 hours, 5 hours, 6 hours, 7 hours, 8 hours, 12 hours, 16 hours, 18 hours, 20 hours, or any other period from about 30 minutes to about 24 hours, which may be repeated with a frequency of about every day to about every 4 days, e.g., every 1.5 days, every 2 days, every 3 days, or any other frequency from about every day to about every four days. The agent(s) may be provided to the subject cells one or more times, e.g., one time, twice, three times, or more than three times, and the cells allowed to incubate with the agent(s) for some amount of time following each contacting event; e.g., 30 minutes to about 24 hours. In the case of in vitro-based methods, after the incubation period with the CasX and gRNA (and optionally the donor template), the media is replaced with fresh media and the cells are cultured further.

[0373] In some embodiments, the method comprises administering to a subject a therapeutically-effective dose of a population of cells modified to correct or compensate for the mutation of the gene. In some embodiments, the administration of the modified cells results in the expression of wild-type or a functional gene product in the subject. In some embodiments of the method, the dose of total cells is within a range of between at or about 10⁴ and at or about 10⁹ cells/kilograms (kg) body weight, such as between 105 and 10⁶ cells/kg body weight, for example, at or about 1×10⁵ cells/kg, 1.5×10⁵ cells/kg, 2×10⁵ cells/kg, or 1×10⁶ cells/kg body weight. For example, in some embodiments, the cells are administered at, or within a certain range of error of, between at or about 104 and at or about 10⁹ cells/kilograms (kg) body weight, such as between 10⁵ and 10⁶ cells/kg body weight, for example, at or about 1×10⁵ cells/kg, 1.5×10⁵ cells/kg, 2×10⁵ cells/kg, or 1×10⁶ cells/kg body weight. In one embodiment, the cells are autologous with respect to the subject to be administered the cells. In another embodiment, the cells are allogeneic with respect to the subject to be administered the cells. In some cases, the subject is selected from the group consisting of mouse, rat, pig, and non-human primate. In other cases, the subject is a human.

### VIII. Therapeutic Methods

[0374] In another aspect, the present disclosure relates to methods of treating a disease or disorder in a subject in need thereof. A number of therapeutic strategies have been used to design the systems for use in the methods of treatment of a subject with a disease or disorder related to a genetic mutation. In some embodiments, the modification of the target nucleic acid occurs in a subject having a mutation in an allele of a gene wherein the mutation causes a disease or disorder in the subject. In some embodiments, the modification of the target nucleic acid changes the mutation to a wild type allele of the gene or results in the expression of a functional gene product. In some embodiments, the modification of the target nucleic acid knocks down or knocks out expression of an allele of a gene causing a disease or disorder in the subject.

[0375] In some embodiments, the method comprises administering to the subject a therapeutically effective dose of a system comprising a gene editing pair of a Class 2, Type V CRISPR nuclease variant and guide RNA variant disclosed herein. In some embodiments, the method of treatment comprises administering to the subject a therapeutically effective dose of: i) a CasX:gRNA system comprising a first CasX variant and a first gRNA variant (with a targeting sequence complementary to the target nucleic acid to be modified) of any of the embodiments described herein; ii) a CasX:gRNA system comprising a first CasX protein and a first gRNA with a targeting sequence complementary to the target nucleic acid and a donor template; iii) a nucleic acid encoding the CasX:gRNA system of (i) or (ii); iv) a vector comprising the nucleic acid of (iii), which can be an AAV of any of the embodiments described herein; v) a XDP comprising the CasX:gRNA system of (i) or (ii); or vi) combinations of two or more of (i)-(v), wherein 1) the gene of the cells of the subject targeted by the first gRNA is modified (e.g., knocked-down or knocked-out) by the CasX protein (and, optionally, the donor template); or 2) the gene of the cells of the subject targeted by the first gRNA is corrected or modified by the CasX protein (and, optionally, the donor template) such that a functional gene product can be expressed. In some embodiments, the method of treating further comprises administering a second or a plurality of gRNA or a nucleic acid encoding the second or plurality of gRNA, wherein the second or plurality of gRNA have targeting sequences complementary to a different or overlapping portion of the target nucleic acid sequence compared to the first gRNA. It will be understood that in the foregoing, each different gRNA is paired with a CasX protein. In embodiments in which two or more gene editing pairs are provided to the cell (e.g., comprising two gRNA comprising two or more different spacers that are complementary to different sequences within the same or different target nucleic acid), the gene pairs may be provided simultaneously (e.g., as two RNPS and/or vectors), or delivered simultaneously. Alternatively, they may be provided consecutively, e.g., the first gene editing pair being provided first, followed by the second gene editing pair, or vice versa.

[0376] In some embodiments, method of treatment comprises administering a therapeutically effective dose of an AAV vector encoding the CasX:gRNA system, and is administered to the subject at a dose of at least about 1×10⁵ vector genomes/kg (vg/kg), at least about 1×10⁶ vg/kg, at least about 1×10⁷ vg/kg, at least about 1×10⁸ vg/kg, at least about 1×10⁹ vg/kg, at least about 1×10¹⁰ vg/kg, at least about 1×10¹¹ vg/kg, at least about 1×10¹² vg/kg, at least about 1×10¹³ vg/kg, at least about 1×10¹⁴ vg/kg, at least about 1×10¹⁵ vg/kg, or at least about 1×10¹⁶ vg/kg. In other embodiments of the method, the AAV vector is administered to the subject at a dose of at least about 1×10⁵ vg/kg to about 1×10¹⁶ vg/kg, at least about 1×10⁶ vg/kg to about 1×10¹⁵ vg/kg, or at least about 1×10⁷ vg/kg to about 1×10¹⁴ vg/kg. In the foregoing, the AAV vector is selected from AAV1, AAV2, AAV3, AAV4, AAV5, AAV6, AAV7, AAV8, AAV9, AAV10, AAV-Rh74, or AAVRh10. In other embodiments, the method of treatment comprises administering a therapeutically effective dose of a XDP comprising RNP of the CasX:gRNA system to the subject. In one embodiment, the XDP is administered to the subject at a dose of at least about 1×10⁵ particles/kg, at least about 1×10⁶ particles/kg, at least about 1×10⁷ particles/kg at least about 1×10⁸ particles/kg, at least about 1×10⁹ particles/kg, at least about 1×10¹⁰ particles/kg, at least about 1×10¹¹ particles/kg, at least about 1×10¹² particles/kg, at least about 1×10¹³ particles/kg, at least about 1×10¹⁴ particles/kg, at least about 1×10¹⁵ particles/kg, at least about 1×10¹⁶ particles/kg. In another embodiment, the XDP is administered to the subject at a dose of at least about 1×10⁵ particles/kg to about 1×10¹⁶ particles/kg, or at least about 1×10⁶ particles/kg to about 1×10¹⁵ particles/kg, or at least about 1×10⁷ particles/kg to about 1×10¹⁴ particles/kg.The vector or XDP can be administered by a route of administration selected from the group consisting of intraparenchymal, intravenous, intra-arterial, intramuscular, subcutaneous, intracerebroventricular, intracisternal, intrathecal, intracranial, intravitreal, subretinal, intracapsular, and intraperitoneal routes or combinations thereof, wherein the administering method is injection, transfusion, or implantation. The administration can be once, twice, or can be administered multiple times using a regimen schedule of weekly, every two weeks, monthly, quarterly, every six months, once a year, or every 2 or 3 years. In some cases, the subject is selected from the group consisting of mouse, rat, pig, and non-human primate. In other cases, the subject is a human.

[0377] In some embodiments of the method, the modifying comprises introducing a single-stranded break in the target nucleic acid of the targeted cells of a subject. In other cases, the modifying comprises introducing a double-stranded break in the target nucleic acid of the targeted cells of a subject. In some embodiments, the modifying introduces one or more mutations in the target nucleic acid, such as an insertion, deletion, substitution, duplication, or inversion of one or more nucleotides in the gene, wherein expression of the gene product in the modified cells of the subject is reduced by at least about 10%, at least about 20%, at least about 30%, at least about 40%, at least about 50%, at least about 60%, at least about 70%, at least about 80%, or at least about 90% in comparison to a cell that has not been modified. In some cases, the gene of the modified cells of the subject are modified such that least 70%, at least 75%, at least 80%, at least 85%, at least 90%, or at least 95% of the modified cells do not express a detectable level of the gene product. In some embodiments, the administering of the therapeutically effective amount of a CasX:gRNA system to knock down or knock out expression of a gene product to a subject with a disease leads to the prevention or amelioration of the underlying disease such that an improvement is observed in the subject, notwithstanding that the subject may still be afflicted with the underlying disease. In other embodiments, the gene can be modified by the NHEJ host repair mechanisms, or utilized in conjunction with a donor template that is inserted by HDR or HITI mechanisms to either excise, correct, or compensate for the mutation in the cells of the subject, such that expression of a wild-type or functional gene product in modified cells is increased by at least about 50%, at least about 60%, at least about 70%, at least about 80%, at least about 90%, or at least about 95% in comparison to a cell that has not been modified. In some embodiments, the administration of the therapeutically effective amount of the CasX-gRNA system leads to an improvement in at least one clinically-relevant parameter for a disease.

[0378] In some cases, a nucleic acid of the present disclosure (e.g., a recombinant expression vector of the present disclosure) or the CasX variant or gRNA variant can be covered with lipids in an organized structure like a micelle, a liposome, or a lipid nanoparticle. When the organized structure is complexed with DNA it is called a lipoplex. There are three types of lipids, anionic (negatively-charged), neutral, or cationic (positively-charged). Lipoplexes that utilize cationic lipids have proven utility for gene transfer. Cationic lipids, due to their positive charge, naturally complex with the negatively charged DNA. Also as a result of their charge, they interact with the cell membrane. Endocytosis of the lipoplex then occurs, and the DNA is released into the cytoplasm. The cationic lipids also protect against degradation of the DNA by the cell.

[0379] In some cases, a nucleic acid of the disclosure (e.g., an expression vector) includes an insertion site for a guide sequence of interest. For example, a nucleic acid can include an insertion site for a guide sequence of interest, where the insertion site is immediately adjacent to a nucleotide sequence encoding the portion of a gRNA variant (e.g. the scaffold region) that does not change when the guide sequence is changed to hybridize to a desired target sequence. Thus, in some cases, an expression vector includes a nucleotide sequence encoding a gRNA, except that the portion encoding the spacer sequence portion of the gRNA is an insertion sequence (an insertion site). An insertion site is any nucleotide sequence used for the insertion of a spacer in the desired sequence. “Insertion sites” for use with various technologies are known to those of ordinary skill in the art and any convenient insertion site can be used. An insertion site can be for any method for manipulating nucleic acid sequences. For example, in some cases the insertion site is a multiple cloning site (MCS) (e.g., a site including one or more restriction enzyme recognition sequences), a site for ligation independent cloning, a site for recombination-based cloning (e.g., recombination based on ATT sites), a nucleotide sequence recognized by a CRISPR/Cas (e.g. Cas9) based technology, and the like.

### IX. Cells

[0380] In still further embodiments, provided herein are cells comprising components of any of the CasX:gRNA systems described herein. In some embodiments, the cells comprise any of the gRNA variant embodiments as described herein, and further comprises a spacer that is complementary to the target nucleic acid. In some embodiments, the cells further comprise a CasX variant as described herein (e.g., the sequences of Tables 3 and 7). In other embodiments, the cells comprise RNP of any of the CasX:gRNA embodiments described herein. In other embodiments, the disclosure provides cells comprising vectors encoding the CasX:gRNA systems of any of the embodiments described herein. In still other embodiments, the cells comprise target nucleic acid that has been edited by the CasX:gRNA embodiments described herein; either to correct a mutation (knock-in) or to knock-down or knock-out a defective gene.

[0381] In some embodiments, the cell is a modified cell (e.g., a genetically-modified cell) comprising nucleic acid comprising a nucleotide sequence encoding a CasX variant protein of the disclosure. In some embodiments, the genetically modified cell is genetically modified with an mRNA comprising a nucleotide sequence encoding a CasX variant protein. In some embodiments, the cell is genetically modified with a recombinant expression vector comprising: a) a nucleotide sequence encoding a CasX variant protein of the present disclosure; and b) a nucleotide sequence encoding a gRNA of the disclosure, and, optionally, comprises a nucleotide sequence comprising a donor template. In some cases, such cells are used to produce the individual components or RNP of CasX:gRNA systems for use in editing target nucleic acid. In other cases, cells that have been genetically modified in this way may be administered to a subject for purposes such as gene therapy; e.g., to treat a disease or condition caused by a genetic mutation or defect.

[0382] A cell that can serve as a recipient for a CasX variant protein and/or gRNA of the present disclosure and/or a nucleic acid comprising a nucleotide sequence encoding a CasX variant protein and/or a gRNA variant, can be any of a variety of cells, including, e.g., in vitro cells; in vivo cells; ex vivo cells; primary cells; cells of an immortalized cell line; cancer cells; animal cells; plant cells; algal cells; fungal cells; etc. A cell can be a recipient of a CasX RNP of the present disclosure. A cell can be a recipient of a single component of a CasX system of the present disclosure. A cell can be a recipient of a vector encoding the CasX, gRNA and, optionally, a donor template of the CasX:gRNA systems of any of the embodiments described herein.

[0383] Non-limiting examples of cells that can serve as host cells for production of the CasX:gRNA systems disclosed herein include prokaryotic cells (e.g., E coli) and eukaryotic cells (e.g., Baby Hamster Kidney fibroblast (BHK) cells, human embryonic kidney 293 (HEK293) cells, human embryonic kidney 293T (HEK293T) cells, NS0 cells, SP2/0 cells, YO myeloma cells, P3X63 mouse myeloma cells, PER cells, PER.C6 cells, hybridoma cells, NIH3T3 cells, CV-1 (simian) in Origin with SV40 genetic material (COS) cells, HeLa cells, Chinese hamster ovary (CHO) cells, or yeast cells, or other eukaryotic cells known in the art suitable for the production of recombinant products

[0384] In some embodiments, the disclosure provides populations of cells modified for administration to a subject for the treatment of a disease or disorder. Such cells can be autologous with respect to a subject to be administered said cell(s). In other embodiments, the cells can be allogeneic with respect to a subject to be administered said cell(s). A cell can be an animal cell or derived from an animal cell. A cell can be a mammalian cell or derived from a mammalian cell. A cell can be a rodent cell or derived from a rodent cell such as a rat or a mouse. A cell can be a non-human primate cell or derived from a non-human primate cell. A cell can be a human cell or derived from a human cell. Suitable cells may include, in some embodiments, a stem cell (e.g. an embryonic stem (ES) cell, an induced pluripotent stem (iPS) cell; a germ cell (e.g., an oocyte, a sperm, an oogonia, a spermatogonia, etc.); a somatic cell, e.g. a fibroblast, an oligodendrocyte, a glial cell, a hematopoietic stem cell, a neuron progenitor cell, a neuron, a muscle cell, a bone cell, a hepatocyte, a pancreatic cell, a retinal cell, a cancer cell, a T-cell, a B-cell, a fetal cardiomyocyte, a myofibroblast, a mesenchymal stem cell, an autotransplanted expanded cardiomyocyte, an adipocyte, a totipotent cell, a pluripotent cell, a blood stem cell, a myoblast, an adult stem cell, a bone marrow cell, a mesenchymal cell, a parenchymal cell, an epithelial cell, an endothelial cell, a mesothelial cell, fibroblasts, osteoblasts, chondrocytes, exogenous cell, endogenous cell, stem cell, hematopoietic stem cell, bone-marrow derived progenitor cell, myocardial cell, skeletal cell, fetal cell, undifferentiated cell, multi-potent progenitor cell, unipotent progenitor cell, a monocyte, a cardiac myoblast, a skeletal myoblast, a macrophage, a capillary endothelial cell, a xenogenic cell, an allogenic cell, and a post-natal stem cell. In some embodiments, the cell is an immune cell. In some cases, the immune cell is a T cell, a B cell, a monocyte, a natural killer cell, a dendritic cell, or a macrophage. In some cases, the immune cell is a cytotoxic T cell. In some cases, the immune cell is a helper T cell. In some cases, the immune cell is a regulatory T cell (Treg). In some cases, the cell expresses a chimeric antigen receptor (Car-T). In some embodiments, the cell is a stem cell. Stem cells may include, for example, adult stem cells. Adult stem cells can also be referred to as somatic stem cells. In some embodiments, the stem cell is a hematopoietic stem cell (HSC), neural stem cell or a mesenchymal stem cell. In other embodiments, the stem cell is a mesenchymal stem cell (MSC). MSCs originally derived from the embryonal mesoderm and isolated from adult bone marrow, can differentiate to form muscle, bone, cartilage, fat, marrow stroma, and tendon. Methods of isolating MSC are known in the art; and any known method can be used to obtain MSC.

### X. Kits and Articles of Manufacture

[0385] In another aspect, provided herein are kits comprising a CasX protein and one or a plurality of gRNA of any of the embodiments of the disclosure and a suitable container (for example a tube, vial or plate). In some embodiments, the kit comprises a gRNA variant of the disclosure, or the reference gRNA of SEQ ID NO: 5 or SEQ ID NO: 4. Exemplary gRNA variants that can be included comprise a sequence of any one of SEQ ID NOS: 2238-XX, as set forth in Table 2.

[0386] In some embodiments, the kit comprises a CasX variant protein of the disclosure (e.g., a sequence of Table 3 and 7), or the reference CasX protein of SEQ ID NO: 1, SEQ ID NO: 2, or SEQ ID NO: 3. In exemplary embodiments, a kit of the disclosure comprises a CasX variant of any one of SEQ ID NOS: 247-592 and 1147-1231. In further exemplary embodiments, a kit of the disclosure comprises a CasX variant of any one of SEQ ID NOS: 270-592 and 1147-1231. In further exemplary embodiments, a kit of the disclosure comprises a CasX variant of any one of SEQ ID NOS: 415-592 and 1147-1231.

[0387] In some embodiments, the kit comprises a gRNA or a vector encoding a gRNA, wherein the gRNA comprises a sequence selected from the group consisting of SEQ ID NOS: 2101-2332 and 2353-2398. In some embodiments, the gRNA comprises a sequence selected from the group consisting of SEQ ID NOS: 2238-2332 and 2353-2398. In some embodiments, the gRNA comprises a sequence selected from the group consisting of SEQ ID NOS: 2281-2332 and 2353-2398. In some embodiments, the gRNA comprises a sequence selected from the group consisting of SEQ ID NOS: 2236, 2237, 2238, 2241, 2244, 2248, 2249, and 2259-2280. n some embodiments, the gRNA comprises a sequence selected from the group consisting of any one of the sequences set forth in Table 2.

[0388] In certain embodiments, provided herein are kits comprising a CasX protein and gRNA editing pair comprising a CasX variant protein of Table 3 and 7 and a gRNA variant as described herein (e.g., a sequence of Table 2). In exemplary embodiments, a kit of the disclosure comprises a CasX and gRNA editing pair, wherein the CasX variant comprises of any one of SEQ ID NOS: 247-592 or 1147-1231. In further exemplary embodiments, a kit of the disclosure comprises a CasX and gRNA editing pair, wherein the CasX variant comprises of any one of SEQ ID NOS: 270-592 and 1147-1231. In further exemplary embodiments, a kit of the disclosure comprises a CasX and gRNA editing pair, wherein the CasX variant comprises of any one of SEQ ID NOS: 415-592 and 1147-1231.In some embodiments, the gRNA of the gene editing pair comprises any one of SEQ ID NOS: 2101-2332 or 2353-2398. In some embodiments, the gRNA of the gene editing pair comprises any one of SEQ ID NOS: 2238-2332 or 2353-2398. In some embodiments, the gRNA of the gene editing pair comprises any one of SEQ ID NOS: 2281-2332 or 2353-2398In some embodiments, the gRNA of the gene editing pair comprises any one of SEQ ID NOS: 2236, 2237, 2238, 2241, 2244, 2248, 2249, or 2259-2280.

[0389] In some embodiments, the kit further comprises a buffer, a nuclease inhibitor, a protease inhibitor, a liposome, a therapeutic agent, a label, a label visualization reagent, or any combination of the foregoing. In some embodiments, the kit further comprises a pharmaceutically acceptable carrier, diluent or excipient.

[0390] In some embodiments, the kit comprises appropriate control compositions for gene editing applications, and instructions for use.

[0391] In some embodiments, the kit comprises a vector comprising a sequence encoding a CasX variant protein of the disclosure, a gRNA variant of the disclosure, optionally a donor template, or a combination thereof.

[0392] The present description sets forth numerous exemplary configurations, methods, parameters, and the like. It should be recognized, however, that such description is not intended as a limitation on the scope of the present disclosure, but is instead provided as a description of exemplary embodiments. Embodiments of the present subject matter described above may be beneficial alone or in combination, with one or more other aspects or embodiments. Without limiting the foregoing description, certain non-limiting embodiments of the disclosure are provided below. As will be apparent to those of skill in the art upon reading this disclosure, each of the individually numbered embodiments may be used or combined with any of the preceding or following individually numbered embodiments. This is intended to provide support for all such combinations of embodiments and is not limited to combinations of embodiments explicitly provided below:

### ENUMERATED EMBODIMENTS

[0393] The invention may be defined by reference to the following enumerated, illustrative embodiments.

### Set I

[0394] Embodiment 1. A variant of a reference CasX protein (CasX variant), wherein:
[0395] a. the CasX variant comprises at least one modification in the reference CasX protein; and
[0396] b. the CasX variant exhibits at least one improved characteristic as compared to the reference CasX protein, optionally wherein the variant comprises a sequence selected from those provided in Table 3 and 8.

[0397] Embodiment 2. The CasX variant of embodiment 1, wherein the improved characteristic of the CasX variant is selected from the group consisting of: improved folding of the CasX variant; improved binding affinity to a guide nucleic acid (gNA); improved binding affinity to a target DNA; improved ability to utilize a greater spectrum of one or more PAM sequences, including ATC, CTC, GTC, or TTC, in the editing of target DNA; improved unwinding of the target DNA; increased editing activity; improved editing efficiency; improved editing specificity; increased nuclease activity; increased target strand loading for double strand cleavage; decreased target strand loading for single strand nicking; decreased off-target cleavage; improved binding of non-target DNA strand; improved protein stability; improved protein solubility; improved protein:gRNA complex (RNP) stability; improved protein:gRNA complex solubility; improved protein yield; improved protein expression; improved fusion characteristics or a combination thereof.

[0398] Embodiment 3. The Cas X variant of embodiment 1 or 2, wherein the at least one modification comprises:
[0399] a. at least one amino acid substitution in a domain of the CasX variant;
[0400] b. at least one amino acid deletion in a domain of the CasX variant;
[0401] c. at least one amino acid insertion in a domain of the CasX variant;
[0402] d. a substitution of all or a portion of a domain from a different CasX;
[0403] e. a deletion of all or a portion of a domain of the CasX variant; or
[0404] f. any combination of (a)-(e).

[0405] Embodiment 4. The CasX variant of any one of embodiments 1-3, wherein the reference CasX protein comprises the sequence of SEQ ID NO: 1, SEQ ID NO: 2, SEQ ID NO: 3, SEQ ID NO: 270, or SEQ ID NO: 336.

[0406] Embodiment 5. The CasX variant of any one of embodiments 1-4, wherein the at least one modification is in a domain selected from:
[0407] a. a non-target strand binding (NTSB) domain;
[0408] b. a target strand loading (TSL) domain;
[0409] c. a helical I domain;
[0410] d. a helical II domain;
[0411] e. an oligonucleotide binding domain (OBD); or
[0412] f. a RuvC DNA cleavage domain.

[0413] Embodiment 6. The CasX variant of embodiment 5, comprising at least one modification in the NTSB domain.

[0414] Embodiment 7. The CasX variant of embodiment 5, comprising at least one modification in the TSL domain.

[0415] Embodiment 8. The CasX variant of embodiment 5, comprising at least one modification in the helical I domain.

[0416] Embodiment 9. The CasX variant of any one of embodiments 5-8, comprising at least one modification in the helical II domain.

[0417] Embodiment 10. The CasX variant of embodiment 5, comprising at least one modification in the OBD domain.

[0418] Embodiment 11. The CasX variant of embodiment 5, comprising at least one modification in the RuvC DNA cleavage domain.

[0419] Embodiment 12. The CasX variant of any one of embodiments 5-11, wherein the modification results in an increased ability to edit the target DNA.

[0420] Embodiment 13. The CasX variant of any one of the embodiments 1 to 12, wherein the CasX variant is capable of forming a ribonuclear protein complex (RNP) with a guide nucleic acid (gNA).

[0421] Embodiment 14. The CasX variant of any one of embodiments 1 to 13, wherein the at least one modification comprises:
[0422] a. a substitution of 1 to 100 consecutive or non-consecutive amino acids in the CasX variant;
[0423] b. a deletion of 1 to 100 consecutive or non-consecutive amino acids in the CasX variant;
[0424] c. an insertion of 1 to 100 consecutive or non-consecutive amino acids in the CasX; or
[0425] d. any combination of (a)-(c).

[0426] Embodiment 15. The CasX variant of embodiment 14, wherein the at least one modification comprises:
[0427] a. a substitution of 5-10 consecutive or non-consecutive amino acids in the CasX variant;
[0428] b. a deletion of 1-5 consecutive or non-consecutive amino acids in the CasX variant;
[0429] c. an insertion of 1-5 consecutive or non-consecutive amino acids in the CasX; or
[0430] d. any combination of (a)-(c).

[0431] Embodiment 16. The CasX variant of any one of embodiments 1 to 15, wherein the CasX variant comprises two or more modifications in one domain.

[0432] Embodiment 17. The CasX variant of any one embodiments 1 to 16, wherein the CasX variant comprises modifications in two or more domains.

[0433] Embodiment 18. The CasX variant of any one of embodiments 1-15, comprising at least one modification of a region of non-contiguous amino acid residues of the CasX variant that form a channel in which gNA:target DNA complexing with the CasX variant occurs.

[0434] Embodiment 19. The CasX variant of any one of embodiments 1-15, comprising at least one modification of a region of non-contiguous amino acid residues of the CasX variant that form an interface which binds with the gNA.

[0435] Embodiment 20. The CasX variant of any one of embodiments 1-15, comprising at least one modification of a region of non-contiguous amino acid residues of the CasX variant that form a channel which binds with the non-target strand DNA.

[0436] Embodiment 21. The CasX variant of any one of embodiments 1-15, comprising at least one modification of a region of non-contiguous amino acid residues of the CasX variant that form an interface which binds with the protospacer adjacent motif (PAM) of the target DNA.

[0437] Embodiment 22. The CasX variant of any one of embodiments 1-15, comprising at least one modification of a region of non-contiguous surface-exposed amino acid residues of the CasX variant.

[0438] Embodiment 23. The CasX variant of any one of embodiments 1-15, comprising at least one modification of a region of non-contiguous amino acid residues that form a core through hydrophobic packing in a domain of the CasX variant.

[0439] Embodiment 24. The CasX variant of any one of embodiments 18-23, wherein the modification is one or more of a deletion, an insertion, or a substitution of one or more amino acids of the region.

[0440] Embodiment 25. The CasX variant of any one of embodiments 18-23, wherein between 2 to 15 amino acid residues of the region of the CasX variant are substituted with charged amino acids.

[0441] Embodiment 26. The CasX variant of any one of embodiments 18-23, wherein between 2 to 15 amino acid residues of a region of the CasX variant are substituted with polar amino acids.

[0442] Embodiment 27. The CasX variant of any one of embodiments 18-23, wherein between 2 to 15 amino acid residues of a region of the CasX variant are substituted with amino acids that stack with DNA or RNA bases.

[0443] Embodiment 28. The CasX variant of any one of embodiments 1-5, wherein the CasX variant has a sequence selected from the group consisting of the sequences of Table 3, or a sequence having at least about 50%, at least about 60%, at least about 70%, at least about 80%, at least about 90%, or at least about 95%, or at least about 96%, or at least about 97%, or at least about 98%, or at least about 99%, sequence identity thereto.

[0444] Embodiment 29. The CasX variant of any one of embodiments 1-5, further comprising a substitution of an NTSB and/or a helical 1b domain from a different CasX.

[0445] Embodiment 30. The CasX variant of embodiment 29, wherein the substituted NTSB and/or the helical 1b domain is from the reference CasX of SEQ ID NO: 1.

[0446] Embodiment 31. The CasX variant of any one of embodiments 1 to 30, further comprising one or more nuclear localization signals (NLS).

[0447] Embodiment 32. The CasX variant of embodiment 31, wherein the one or more NLS are selected from the group of sequences consisting of PKKKRKV (SEQ ID NO: 352), KRPAATKKAGQAKKKK (SEQ ID NO: 353), PAAKRVKLD (SEQ ID NO: 354), RQRRNELKRSP (SEQ ID NO: 355), NQSSNFGPMKGGNFGGRSSGPYGGGGQYFAKPRNQGGY (SEQ ID NO: 356), RMRIZFKNKGKDTAELRRRRVEVSVELRKAKKDEQILKRRNV (SEQ ID NO: 357), VSRKRPRP (SEQ ID NO: 358), PPKKARED (SEQ ID NO: 35( ), PQPKKKPL (SEQ ID NO: 360), SALIKKKKKMAP (SEQ ID NO: 361), DRLRR (SEQ ID NO: 362), PKQKKRK (SEQ ID NO: 363), RKLKKKIKKL (SEQ ID NO: 364), REKKKFLKRR (SEQ ID NO: 365), KRKGDEVDGVDEVAKKKSKK (SEQ ID NO: 366), RKCLQAGMNLEARKTKK (SEQ ID NO: 367), PRPRKIPR (SEQ ID NO: 368), PPRKKRTVV (SEQ ID NO: 369), NLSKKKKRKREK (SEQ ID NO: 370), RRPSRPFRKP (SEQ ID NO: 371), KRPRSPSS (SEQ ID NO: 372), KRGINDRNFWRGENERKTR (SEQ ID NO: 373), PRPPKMARYDN (SEQ ID NO: 374), KRSFSKAF (SEQ ID NO: 375), KLKIKRPVK (SEQ ID NO: 376), PKKKRKVPPPPAAKRVKLD (SEQ ID NO: 377), PKTRRRPRRSQRKRPPT (SEQ ID NO: 378), SRRRKANPTKLSENAKKLAKEVEN (SEQ ID NO: 379), KTRRRPRRSQRKRPPT (SEQ ID NO: 380), RRKKRRPRRKKRR (SEQ ID NO: 381), PKKKSRKPKKKSRK (SEQ ID NO: 382), HKKKHPDASVNFSEFSK (SEQ ID NO: 383), QRPGPYDRPQRPGPYDRP (SEQ ID NO: 384), LSPSLSPLLSPSLSPL (SEQ ID NO: 385), RGKGGKGLGKGGAKRHRK (SEQ ID NO: 386), PKRGRGRPKRGRGR (SEQ ID NO: 387), and PKKKRKVPPPPKKKRKV (SEQ ID NO: 389).

[0448] Embodiment 33. The CasX variant of embodiment 31 or embodiment 32, wherein the one or more NLS are positioned at or near the C-terminus of the CasX protein.

[0449] Embodiment 34. The CasX variant of embodiment 31 or embodiment 32, wherein the one or more NLS are positioned at or near at the N-terminus of the CasX protein.

[0450] Embodiment 35. The CasX variant of embodiment 31 or embodiment 32, comprising at least two NLS, wherein the at least two NLS are positioned at or near the N-terminus and at or near the C-terminus of the CasX protein.

[0451] Embodiment 36. The CasX variant of any one of embodiments 2-35, wherein one or more of the improved characteristics of the CasX variant is at least about 1.1 to about 100-fold or more improved relative to the reference CasX protein of SEQ ID NO: 1, SEQ ID NO: 2, or SEQ ID NO: 3.

[0452] Embodiment 37. The CasX variant of embodiment 2-35, wherein one or more of the improved characteristics of the CasX variant is at least about 1.1, at least about 2, at least about 10, at least about 100-fold or more improved relative to the reference CasX protein of SEQ ID NO: 1, SEQ ID NO: 2, SEQ ID NO: 3, SEQ ID NO: 270, or SEQ ID NO: 336.

[0453] Embodiment 38. The CasX variant of any one of embodiments 2-37, wherein the improved characteristic comprises editing efficiency, and the CasX variant comprises a 1.1 to 100-fold improvement in editing efficiency compared to the reference CasX protein of SEQ ID NO: 270 or SEQ ID NO: 336.

[0454] Embodiment 39. The CasX variant of any one of embodiments 1 to 38, wherein the RNP comprising the CasX variant exhibits greater editing efficiency and/or binding of a target sequence in the target DNA when any one of the PAM sequences TTC, ATC, GTC, or CTC is located 1 nucleotide 5′ to the non-target strand of the protospacer having identity with the targeting sequence of the gRNA in a cellular assay system compared to the editing efficiency and/or binding of an RNP comprising a reference CasX protein in a comparable assay system.

[0455] Embodiment 40. The CasX variant of embodiment 39, wherein the PAM sequence is TTC.

[0456] Embodiment 41. The CasX variant of embodiment 39, wherein the PAM sequence is ATC.

[0457] Embodiment 42. The CasX variant of embodiment 39, wherein the PAM sequence is CTC.

[0458] Embodiment 43. The CasX variant of embodiment 39, wherein the PAM sequence is GTC.

[0459] Embodiment 44. The CasX variant of any one of embodiments 39, wherein the improved editing efficiency and/or binding to the target DNA of the RNP comprising the CasX variant is at least about 1.1 to about 100-fold improved relative to the RNP comprising the reference CasX.

[0460] Embodiment 45. The CasX variant of any one of embodiments 1 to 44, wherein the CasX variant comprises between 400 and 2000 amino acids.

[0461] Embodiment 46. The CasX variant of any one of embodiments 1 to 45, wherein the CasX variant protein comprises a nuclease domain having nickase activity.

[0462] Embodiment 47. The CasX variant of any one of embodiments 1-45, wherein the CasX variant protein comprises a nuclease domain having double-stranded cleavage activity.

[0463] Embodiment 48. The CasX variant of any one of embodiments 1-45, wherein the CasX protein is a catalytically inactive CasX (dCasX) protein, and wherein the dCasX and the gNA retain the ability to bind to the target DNA.

[0464] Embodiment 49. The CasX variant of embodiment 48, wherein the dCasX comprises a mutation at residues:
[0465] a. D672, and/or E769, and/or D935 corresponding to the CasX protein of SEQ ID NO:1; or
[0466] b. D659, and/or E756, and/or D922 corresponding to the CasX protein of SEQ ID NO: 2.

[0467] Embodiment 50. The CasX variant of embodiment 49, wherein the mutation is a substitution of alanine for the residue.

[0468] Embodiment 51. The CasX variant of any one of embodiments 1 to 50, wherein the CasX variant comprises a first domain from a first CasX protein and second domain from a second CasX protein different from the first CasX protein.

[0469] Embodiment 52. The CasX variant of embodiment 51, wherein the first domain is selected from the group consisting of the NTSB, TSL, helical I, helical II, OBD, and RuvC domains.

[0470] Embodiment 53. The CasX variant of embodiment 51, wherein the second domain is selected from the group consisting of the NTSB, TSL, helical I, helical II, OBD, and RuvC domains.

[0471] Embodiment 54. The CasX variant of any one of embodiments 51 to 53, wherein the first and second domains are not the same domain.

[0472] Embodiment 55. The CasX variant of any one of embodiments 1 to 50, wherein the CasX variant comprises at least one chimeric domain comprising a first part from a first CasX protein and a second part from a second CasX protein different from the first CasX protein.

[0473] Embodiment 56. The CasX variant of embodiment 55, wherein the at least one chimeric domain is selected from the group consisting of the NTSB, TSL, helical I, helical II, OBD, and RuvC domains.

[0474] Embodiment 57. The CasX variant of embodiment 56, wherein the at least one chimeric domain comprises a chimeric RuvC domain.

[0475] Embodiment 58. The CasX variant of any one embodiments of 1 to 57, comprising a heterologous protein or domain thereof fused to the CasX.

[0476] Embodiment 59. The CasX variant of embodiment 58, wherein the heterologous protein or domain thereof is a base editor.

[0477] Embodiment 60. The CasX variant of embodiment 59, wherein the base editor is an adenosine deaminase, a cytosine deaminase or a guanine oxidase.

[0478] Embodiment 61. A variant of a reference guide nucleic acid scaffold (gNA variant) capable of binding a reference CasX protein or a CasX variant, wherein:
[0479] a. the gNA variant comprises at least one modification compared to the reference guide nucleic acid scaffold sequence; and
[0480] b. the gNA variant exhibits one or more improved characteristics compared to the reference guide nucleic acid scaffold.

[0481] Embodiment 62. The gNA variant of embodiment 61, wherein the one or more improved characteristics is selected from the group consisting of: improved stability; improved solubility; improved transcription of the gNA; improved resistance to nuclease activity; increased folding rate of the gNA; decreased side product formation during folding; increased productive folding; improved binding affinity to a CasX protein; improved binding affinity to a target DNA when complexed with the CasX protein; improved gene editing when complexed with the CasX protein; improved specificity of editing when complexed with the CasX protein; and improved ability to utilize a greater spectrum of one or more PAM sequences, including ATC, CTC, GTC, or TTC, in the editing of target DNA when complexed with the CasX protein.

[0482] Embodiment 63. The gNA variant of embodiment 61 or 62, wherein the reference guide scaffold comprises a sequence selected from the group consisting of the sequences of SEQ ID NOS: 4-16 or SEQ ID NO: 2238 or SEQ ID NO: 2239.

[0483] Embodiment 64. The gNA variant of any one of embodiments 61 to 63, wherein the at least one modification comprises:
[0484] a. at least one nucleotide substitution in a region of the gNA variant;
[0485] b. at least one nucleotide deletion in a region of the gNA variant;
[0486] c. at least one nucleotide insertion in a region of the gNA variant;
[0487] d. a substitution of all or a portion of a region of the gNA variant;
[0488] e. a deletion of all or a portion of a region of the gNA variant; or
[0489] f. any combination of (a)-(e).

[0490] Embodiment 65. The gNA variant of embodiment 64, wherein the region of the gNA variant is selected from the group consisting of extended stem loop, scaffold stem loop, triplex, and pseudoknot.

[0491] Embodiment 66. The gNA variant of embodiment 65, wherein the scaffold stem further comprises a bubble.

[0492] Embodiment 67. The gNA variant of embodiment 65 or embodiment 66, wherein the scaffold further comprises a triplex loop region.

[0493] Embodiment 68. The gNA variant of any one of embodiments 65-67, wherein the scaffold further comprises a 5′ unstructured region.

[0494] Embodiment 69. The gNA variant of any one of embodiments 64 to 68, wherein the at least one modification comprises:
[0495] a. a substitution of 1 to 15 consecutive or non-consecutive nucleotides in the gNA variant in one or more regions;
[0496] b. a deletion of 1 to 10 consecutive or non-consecutive nucleotides in the gNA variant in one or more regions;
[0497] c. an insertion of 1 to 10 consecutive or non-consecutive nucleotides in the gNA variant in one or more regions;
[0498] d. a substitution of the scaffold stem loop or the extended stem loop with an RNA stem loop sequence from a heterologous RNA source with proximal 5′ and 3′ ends; or
[0499] e. any combination of (a)-(d).

[0500] Embodiment 70. The gNA variant of any one of embodiments 61-69, comprising an extended stem loop region comprising at least 10, at least 100, at least 500, at least 1000, or at least 10,000 nucleotides.

[0501] Embodiment 71. The gNA variant of embodiment 69, wherein the heterologous RNA stem loop sequence increases the stability of the gNA.

[0502] Embodiment 72. The gNA variant of embodiment 71, wherein the heterologous RNA stem loop is capable of binding a protein, an RNA structure, a DNA sequence, or a small molecule.

[0503] Embodiment 73. The gNA variant of embodiment 71 or embodiment 72, wherein the heterologous RNA stem loop sequence is selected from MS2, QP, U1 hairpin II, Uvsx, or PP7 stem loops.

[0504] Embodiment 74. The gNA variant of any one of embodiments 61-73, the gNA variant comprises two or more modifications in one region.

[0505] Embodiment 75. The gNA variant of any one of embodiments 61-74, wherein the gNA variant comprises modifications in two or more regions.

[0506] Embodiment 76. The gNA variant of any one of embodiments 61-75, wherein the gNA variant further comprises a targeting sequence wherein the targeting sequence is complementary to the target DNA sequence.

[0507] Embodiment 77. The gNA variant of embodiment 76, wherein the targeting sequence has 14, 15, 16, 17, 18, 19, 20, 21, 22, 23, 24, 25, 26, 27, 28, 29, 30, 31, 32, 33, 34 or 35 nucleotides.

[0508] Embodiment 78. The gNA variant of any one of embodiments 76 or embodiment 77, wherein the targeting sequence has 20 nucleotides.

[0509] Embodiment 79. The gNA variant of any one of embodiments 76-78, wherein the gNA is a single-guide gNA comprising the scaffold sequence linked to the targeting sequence.

[0510] Embodiment 80. The gNA variant of any one of embodiments 61 to 79, wherein the one or more of the improved characteristics of the CasX variant is at least about 1.1 to about 100-fold or more improved relative to the reference gNA of SEQ ID NO: 4 or SEQ ID NO: 5.

[0511] Embodiment 81. The gNA variant of any one of embodiments 61 to 79, wherein one or more of the improved characteristics of the gNA variant is at least about 1.1, at least about 2, at least about 10, or at least about 100-fold or more improved relative to the reference gNA of SEQ ID NO: 4, SEQ ID NO: 5, SEQ ID NO: 2238, SEQ ID NO: 2239, Variant Scaffold 174 (Table 2), or Variant Scaffold 175 (Table 2).

[0512] Embodiment 82. The gNA variant of any one of embodiments 61-81, comprising a scaffold region having at least 60% sequence identity to SEQ ID NO: 4 or SEQ ID NO: 5 exclusive of the extended stem region.

[0513] Embodiment 83. The gNA variant of any one of embodiments 61-81, comprising a scaffold stem loop having at least 60% sequence identity to SEQ ID NO: 14.

[0514] Embodiment 84. The gNA variant of any one of embodiments 61-81, wherein the scaffold of the gNA variant sequence has at least 20%, at least 30%, at least 40%, at least 50%, at least 60%, or at least 70%, at least 80%, at least 85%, at least about 90%, at least about 95%, at least about 96%, at least about 97%, at least about 98%, or at least about 99% identity to the sequence of SEQ ID NO: 4, SEQ ID NO: 5, SEQ ID NO: 2238, SEQ ID NO: 2239, Variant Scaffold 174 (Table 2), or Variant Scaffold 175 (Table 2).

[0515] Embodiment 85. The gNA variant of any one of embodiments 61-81, the scaffold of the gNA variant sequence comprises a sequence selected from the group of sequences of SEQ ID NOS: 2101-2285 or 4433-4437, or having at least about 80%, at least about 90%, at least about 95%, at least about 96%, at least about 97%, at least about 98%, at least about 99% identity thereto.

[0516] Embodiment 86. The gNA variant of embodiment 85, wherein the scaffold of the gNA variant sequence consists of a sequence selected from the group of sequences of SEQ ID NOS: 2101-2285 or 4433-4437.

[0517] Embodiment 87. The gNA variant of any one of embodiments 61-86, further comprising one or more ribozymes.

[0518] Embodiment 88. The gNA variant of embodiment 87, wherein the one or more ribozymes are independently fused to a terminus of the gNA variant.

[0519] Embodiment 89. The gNA variant of embodiment 87 or embodiment 88, wherein at least one of the one or more ribozymes are an hepatitis delta virus (HDV) ribozyme, hammerhead ribozyme, pistol ribozyme, hatchet ribozyme, or tobacco ringspot virus (TRSV) ribozyme.

[0520] Embodiment 90. The gNA variant of any one of embodiments 61-89, further comprising a protein binding motif.

[0521] Embodiment 91. The gNA variant of any one of embodiments 61-90, further comprising a thermostable stem loop.

[0522] Embodiment 92. The gNA variant of any one of embodiments 61-91, wherein the gNA is chemically modified.

[0523] Embodiment 93. The gNA variant of any one of embodiments 61 to 92, wherein the gNA comprises a first region from a first gNA and a second region from a second gNA different from the first gNA.

[0524] Embodiment 94. The gNA variant of embodiment 93, wherein the first region is selected from the group consisting of a triplex region, a scaffold stem loop, and an extended stem loop.

[0525] Embodiment 95. The gNA variant of embodiment 93 or embodiment 94, wherein the second region is selected from the group consisting of a triplex region, a scaffold stem loop, and an extended stem loop.

[0526] Embodiment 96. The gNA variant of any one of embodiments 93 to 95, wherein the first and second regions are not the same region.

[0527] Embodiment 97. The gNA variant of any one of embodiments 93 to 95, wherein the first gNA comprises a sequence of SEQ ID NO: 4 and the second gNA comprises a sequence of SEQ ID NO: 5.

[0528] Embodiment 98. The gNA variant of any one of embodiments 61 to 97, comprising at least one chimeric region comprising a first part from a first gNA and a second part from a second gNA.

[0529] Embodiment 99. The gNA variant of embodiment 98, wherein the at least one chimeric region is selected from the group consisting of a triplex region, a scaffold stem loop, and an extended stem loop.

[0530] Embodiment 100. The gNA variant of embodiment 61, comprising the sequence of any one of any one of SEQ ID NOS: 2101-2285.

[0531] Embodiment 101. A gene editing pair comprising a CasX protein and a first gNA.

[0532] Embodiment 102. The gene editing pair of embodiment 101, wherein the CasX and the gNA are capable of associating together in a ribonuclear protein complex (RNP).

[0533] Embodiment 103. The gene editing pair of embodiment 101, wherein the CasX and the gNA are associated together in a ribonuclear protein complex (RNP).

[0534] Embodiment 104. The gene editing pair of any one of embodiments 101-103, wherein the first gNA comprises a gNA variant of any one of embodiments 76-100, a targeting sequence wherein the targeting sequence is complementary to the target DNA.

[0535] Embodiment 105. The gene editing pair of any one of embodiments 101-104, wherein the CasX comprises a CasX variant of any one of embodiments 1-60.

[0536] Embodiment 106. The gene editing pair of any one of embodiments 101 to 105, comprising:
[0537] a. a gNA variant of any one of embodiments 76-100, and
[0538] b. a CasX variant of any one of embodiments 1-60.

[0539] Embodiment 107. The gene editing pair of embodiment 106, wherein the gene editing pair of the CasX variant and the gNA variant has one or more improved characteristics compared to a gene editing pair comprising a reference CasX protein of SEQ ID NO: 1, SEQ ID NO: 2, SEQ ID NO: 3, SEQ ID NO: 270, or SEQ ID NO: 336, and a reference guide nucleic acid of SEQ ID NOS: 4, 5, 2238, or 2239.

[0540] Embodiment 108. The gene editing pair of embodiment 107, wherein the one or more improved characteristics comprises improved CasX:gNA (RNP) complex stability, improved binding affinity between the CasX and gNA, improved kinetics of RNP complex formation, higher percentage of cleavage-competent RNP, improved RNP binding affinity to a target DNA, ability to utilize an increased spectrum of PAM sequences, improved unwinding of the target DNA, increased editing activity, improved editing efficiency, improved editing specificity, increased nuclease activity, increased target strand loading for double strand cleavage, decreased target strand loading for single strand nicking, decreased off-target cleavage, improved binding of the non-target strand of DNA, or improved resistance to nuclease activity.

[0541] Embodiment 109. The gene editing pair of embodiment 107 or embodiment 108, wherein the at least one or more of the improved characteristics is at least about 1.1 to about 100-fold or more improved relative to a gene editing pair of the reference CasX protein and the reference guide nucleic acid.

[0542] Embodiment 110. The gene editing pair of embodiment 107 or 108, wherein one or more of the improved characteristics of the CasX variant is at least about 1.1, at least about 2, at least about 10, or at least about 100-fold or more improved relative to a gene editing pair of the reference CasX protein and the reference guide nucleic acid.

[0543] Embodiment 111. The gene editing pair of embodiment 107 or embodiment 108, wherein the improved characteristic comprises a 4 to 9 fold increase in editing activity compared to a reference editing pair of SEQ ID NO: 2 and SEQ ID NO: 5.

[0544] Embodiment 112. A composition comprising the gene editing pair of any one of embodiments 101-111, comprising:
[0545] a. a second gene editing pair comprising the CasX variant of any one of embodiments 1-60; and
[0546] b. a second gNA variant of any one of embodiments 61-100, wherein the second gNA variant has a targeting sequence complementary to a different or overlapping portion of the target DNA compared to the targeting sequence of the first gNA.

[0547] Embodiment 113. The gene editing pair of any one of embodiments 101-112, wherein the RNP of the CasX variant and the gNA variant has a higher percentage of cleavage-competent RNP compared to an RNP of a reference CasX protein and a reference guide nucleic acid.

[0548] Embodiment 114. The gene editing pair of any one of embodiments 101-113, wherein the RNP is capable of binding and cleaving a target DNA.

[0549] Embodiment 115. The gene editing pair of any one of embodiments 101-112, wherein the RNP is capable of binding a target DNA but is not capable of cleaving the target DNA.

[0550] Embodiment 116. The gene editing pair of any one of embodiments 101-112, wherein the RNP is capable of binding a target DNA and generating one or more single-stranded nicks in the target DNA.

[0551] Embodiment 117. A CasX variant comprising the amino acid sequence of any one of SEQ ID NO: 4416-4432.

[0552] Embodiment 118. A gNA variant comprising the amino acid sequence of any one of SEQ ID NO: 4433-4437.

### Set II

[0553] Embodiment 1. A variant of a reference CasX protein (CasX variant), wherein:
[0554] a. the CasX variant comprises at least one modification in the reference CasX protein; and
[0555] b. the CasX variant exhibits at least one improved characteristic as compared to the reference CasX protein, optionally wherein the variant comprises a sequence selected from those provided in Table 3 and 8.

[0556] Embodiment 2. The CasX variant of embodiment 1, wherein the improved characteristic of the CasX variant is selected from the group consisting of: improved folding of the CasX variant; improved binding affinity to a guide nucleic acid (gNA); improved binding affinity to a target DNA; improved ability to utilize a greater spectrum of one or more PAM sequences, including ATC, CTC, GTC, or TTC, in the editing of target DNA; improved unwinding of the target DNA; increased editing activity; improved editing efficiency; improved editing specificity; increased nuclease activity; increased target strand loading for double strand cleavage; decreased target strand loading for single strand nicking; decreased off-target cleavage; improved binding of non-target DNA strand; improved protein stability; improved protein solubility; improved protein:gNA complex (RNP) stability; improved protein:gNA complex solubility; improved protein yield; improved protein expression; improved fusion characteristics or a combination thereof.

[0557] Embodiment 3. The Cas X variant of embodiment 1 or 2, wherein the at least one modification comprises:
[0558] a. at least one amino acid substitution in a domain of the CasX variant;
[0559] b. at least one amino acid deletion in a domain of the CasX variant;
[0560] c. at least one amino acid insertion in a domain of the CasX variant;
[0561] d. a substitution of all or a portion of a domain from a different CasX;
[0562] e. a deletion of all or a portion of a domain of the CasX variant; or
[0563] f. any combination of (a)-(e).

[0564] Embodiment 4. The CasX variant of any one of embodiments 1-3, wherein the reference CasX protein comprises the sequence of SEQ ID NO: 1, SEQ ID NO: 2, or SEQ ID NO: 3.

[0565] Embodiment 5. The CasX variant of any one of embodiments 1-4, wherein the at least one modification is in a domain selected from:
[0566] a. a non-target strand binding (NTSB) domain;
[0567] b. a target strand loading (TSL) domain;
[0568] c. a helical I domain;
[0569] d. a helical II domain;
[0570] e. an oligonucleotide binding domain (OBD); or
[0571] f. a RuvC DNA cleavage domain.

[0572] Embodiment 6. The CasX variant of embodiment 5, comprising at least one modification in the NTSB domain.

[0573] Embodiment 7. The CasX variant of embodiment 5, comprising at least one modification in the TSL domain.

[0574] Embodiment 8. The CasX variant of embodiment 5, comprising at least one modification in the helical I domain.

[0575] Embodiment 9. The CasX variant of any one of embodiments 5-8, comprising at least one modification in the helical II domain.

[0576] Embodiment 10. The CasX variant of embodiment 5, comprising at least one modification in the OBD domain.

[0577] Embodiment 11. The CasX variant of embodiment 5, comprising at least one modification in the RuvC DNA cleavage domain.

[0578] Embodiment The CasX variant of any one of embodiments 5-11, wherein the modification results in an increased ability to edit the target DNA.

[0579] Embodiment 13. The CasX variant of any one of the embodiments 1 to 12, wherein the CasX variant is capable of forming a ribonuclear protein complex (RNP) with a guide nucleic acid (gNA).

[0580] Embodiment 14. The CasX variant of any one of embodiments 1 to 13, wherein the at least one modification comprises:
[0581] a. a substitution of 1 to 100 consecutive or non-consecutive amino acids in the CasX variant;
[0582] b. a deletion of 1 to 100 consecutive or non-consecutive amino acids in the CasX variant;
[0583] c. an insertion of 1 to 100 consecutive or non-consecutive amino acids in the CasX; or
[0584] d. any combination of (a)-(c).

[0585] Embodiment 15. The CasX variant of embodiment 14, wherein the at least one modification comprises:
[0586] a. a substitution of 5-10 consecutive or non-consecutive amino acids in the CasX variant;
[0587] b. a deletion of 1-5 consecutive or non-consecutive amino acids in the CasX variant;
[0588] c. an insertion of 1-5 consecutive or non-consecutive amino acids in the CasX; or
[0589] d. any combination of (a)-(c).

[0590] Embodiment 16. The CasX variant of any one of embodiments 1 to 15, wherein the CasX variant comprises two or more modifications in one domain.

[0591] Embodiment 17. The CasX variant of any one of embodiments 1 to 16, wherein the CasX variant comprises modifications in two or more domains.

[0592] Embodiment 18. The CasX variant of any one of embodiments 1-15, comprising at least one modification of a region of non-contiguous amino acid residues of the CasX variant that form a channel in which gNA:target DNA complexing with the CasX variant occurs.

[0593] Embodiment 19. The CasX variant of any one of embodiments 1-15, comprising at least one modification of a region of non-contiguous amino acid residues of the CasX variant that form an interface which binds with the gNA.

[0594] Embodiment 20. The CasX variant of any one of embodiments 1-15, comprising at least one modification of a region of non-contiguous amino acid residues of the CasX variant that form a channel which binds with the non-target strand DNA.

[0595] Embodiment 21. The CasX variant of any one of embodiments 1-15, comprising at least one modification of a region of non-contiguous amino acid residues of the CasX variant that form an interface which binds with the protospacer adjacent motif (PAM) of the target DNA.

[0596] Embodiment 22. The CasX variant of any one of embodiments 1-15, comprising at least one modification of a region of non-contiguous surface-exposed amino acid residues of the CasX variant.

[0597] Embodiment 23. The CasX variant of any one of embodiments 1-15, comprising at least one modification of a region of non-contiguous amino acid residues that form a core through hydrophobic packing in a domain of the CasX variant.

[0598] Embodiment 24. The CasX variant of any one of embodiments 18-23, wherein the modification is one or more of a deletion, an insertion, or a substitution of one or more amino acids of the region.

[0599] Embodiment 25. The CasX variant of any one of embodiments 18-23, wherein between 2 to 15 amino acid residues of the region of the CasX variant are substituted with charged amino acids.

[0600] Embodiment 26. The CasX variant of any one of embodiments 18-23, wherein between 2 to 15 amino acid residues of a region of the CasX variant are substituted with polar amino acids.

[0601] Embodiment 27. The CasX variant of any one of embodiments 18-23, wherein between 2 to 15 amino acid residues of a region of the CasX variant are substituted with amino acids that stack with DNA or RNA bases.

[0602] Embodiment 28. The CasX variant of any one of embodiments 1-5, wherein the CasX variant has a sequence selected from the group consisting of the sequences of Table 3, or a sequence having at least about 50%, at least about 60%, at least about 70%, at least about 80%, at least about 90%, or at least about 95%, or at least about 96%, or at least about 97%, or at least about 98%, or at least about 99%, sequence identity thereto.

[0603] Embodiment 29. The CasX variant of any one of embodiments 1-5, further comprising a substitution of an NTSB and/or a helical 1b domain from a different CasX.

[0604] Embodiment 30. The CasX variant of embodiment 29, wherein the substituted NTSB and/or the helical 1b domain is from the reference CasX of SEQ ID NO: 1.

[0605] Embodiment 31. The CasX variant of any one of embodiments 1 to 30, further comprising one or more nuclear localization signals (NLS).

[0606] Embodiment 32. The CasX variant of embodiment 31, wherein the one or more NLS are selected from the group of sequences consisting of PKKKRKV (SEQ ID NO: 352), KRPAATKKAGQAKKKK (SEQ ID NO: 353), PAAKRVKLD (SEQ ID NO: 354), RQRRNELKRSP (SEQ ID NO: 355), NQSSNFGPMKGGNFGGRSSGPYGGGGQYFAKPRNQGGY (SEQ ID NO: 356), RMRIZFKNKGKDTAELRRRRVEVSVELRKAKKDEQILKRRNV (SEQ ID NO: 357), VSRKRPRP (SEQ ID NO: 358), PPKKARED (SEQ ID NO: 35( ), PQPKKKPL (SEQ ID NO: 360), SALIKKKKKMAP (SEQ ID NO: 361), DRLRR (SEQ ID NO: 362), PKQKKRK (SEQ ID NO: 363), RKLKKKIKKL (SEQ ID NO: 364), REKKKFLKRR (SEQ ID NO: 365), KRKGDEVDGVDEVAKKKSKK (SEQ ID NO: 366), RKCLQAGMNLEARKTKK (SEQ ID NO: 367), PRPRKIPR (SEQ ID NO: 368), PPRKKRTVV (SEQ ID NO: 369), NLSKKKKRKREK (SEQ ID NO: 370), RRPSRPFRKP (SEQ ID NO: 371), KRPRSPSS (SEQ ID NO: 372), KRGINDRNFWRGENERKTR (SEQ ID NO: 373), PRPPKMARYDN (SEQ ID NO: 374), KRSFSKAF (SEQ ID NO: 375), KLKIKRPVK (SEQ ID NO: 376), PKKKRKVPPPPAAKRVKLD (SEQ ID NO: 377), PKTRRRPRRSQRKRPPT (SEQ ID NO: 378), SRRRKANPTKLSENAKKLAKEVEN (SEQ ID NO: 379), KTRRRPRRSQRKRPPT (SEQ ID NO: 380), RRKKRRPRRKKRR (SEQ ID NO: 381), PKKKSRKPKKKSRK (SEQ ID NO: 382), HKKKHPDASVNFSEFSK (SEQ ID NO: 383), QRPGPYDRPQRPGPYDRP (SEQ ID NO: 384), LSPSLSPLLSPSLSPL (SEQ ID NO: 385), RGKGGKGLGKGGAKRHRK (SEQ ID NO: 386), PKRGRGRPKRGRGR (SEQ ID NO: 387), PKKKRKVPPPPKKKRKV (SEQ ID NO: 389), PAKRARRGYKC (SEQ ID NO: 4599), KLGPRKATGRW (SEQ ID NO: 4600), PRRKREE (SEQ ID NO: 4601), PYRGRKE (SEQ ID NO: 4602), PLRKRPRR (SEQ ID NO: 4603), PLRKRPRRGSPLRKRPRR (SEQ ID NO: 4604), PAAKRVKLDGGKRTADGSEFESPKKKRKV (SEQ ID NO: 4605), PAAKRVKLDGGKRTADGSEFESPKKKRKVGIHGVPAA (SEQ ID NO: 4606), PAAKRVKLDGGKRTADGSEFESPKKKRKVAEAAAKEAAAKEAAAKA (SEQ ID NO: 4607), PAAKRVKLDGGKRTADGSEFESPKKKRKVPG (SEQ ID NO: 4608), KRKGSPERGERKRHW (SEQ ID NO: 4609), KRTADSQHSTPPKTKRKVEFEPKKKRKV (SEQ ID NO: 4610), and PKKKRKVGGSKRTADSQHSTPPKTKRKVEFEPKKKRKV (SEQ ID NO: 4611).

[0607] Embodiment 33. The CasX variant of embodiment 31 or embodiment 32, wherein the one or more NLS are positioned at or near the C-terminus of the CasX protein.

[0608] Embodiment 34. The CasX variant of embodiment 31 or embodiment 32, wherein the one or more NLS are positioned at or near at the N-terminus of the CasX protein.

[0609] Embodiment 35. The CasX variant of embodiment 31 or embodiment 32, comprising at least two NLS, wherein the at least two NLS are positioned at or near the N-terminus and at or near the C-terminus of the CasX protein.

[0610] Embodiment 36. The CasX variant of any one of embodiments 2-35, wherein one or more of the improved characteristics of the CasX variant is at least about 1.1 to about 100-fold or more improved relative to the reference CasX protein of SEQ ID NO: 1, SEQ ID NO: 2, or SEQ ID NO: 3.

[0611] Embodiment 37. The CasX variant of embodiment 2-35, wherein one or more of the improved characteristics of the CasX variant is at least about 1.1, at least about 2, at least about 10, at least about 100-fold or more improved relative to the CasX protein of SEQ ID NO: 1, SEQ ID NO: 2, SEQ ID NO: 3, SEQ ID NO: 270, or SEQ ID NO: 336.

[0612] Embodiment 38. The CasX variant of any one of embodiments 2-37, wherein the improved characteristic comprises editing efficiency, and the CasX variant comprises a 1.1 to 100-fold improvement in editing efficiency compared to the CasX protein of SEQ ID NO: 270 or SEQ ID NO: 336.

[0613] Embodiment 39. The CasX variant of any one of embodiments 1 to 38, wherein the RNP comprising the CasX variant exhibits greater editing efficiency and/or binding of a target sequence in the target DNA when any one of the PAM sequences TTC, ATC, GTC, or CTC is located 1 nucleotide 5′ to the non-target strand of the protospacer having identity with the targeting sequence of the gNA in a cellular assay system compared to the editing efficiency and/or binding of an RNP comprising a reference CasX protein in a comparable assay system.

[0614] Embodiment 40. The CasX variant of embodiment 39, wherein the PAM sequence is TTC.

[0615] Embodiment 41. The CasX variant of embodiment 39, wherein the PAM sequence is ATC.

[0616] Embodiment 42. The CasX variant of embodiment 39, wherein the PAM sequence is CTC.

[0617] Embodiment 43. The CasX variant of embodiment 39, wherein the PAM sequence is GTC.

[0618] Embodiment 44. The CasX variant of any one of embodiments 39, wherein the improved editing efficiency and/or binding to the target DNA of the RNP comprising the CasX variant is at least about 1.1 to about 100-fold improved relative to the RNP comprising the reference CasX.

[0619] Embodiment 45. The CasX variant of any one of embodiments 1 to 44, wherein the CasX variant comprises between 400 and 2000 amino acids.

[0620] Embodiment 46. The CasX variant of any one of embodiments 1 to 45, wherein the CasX variant protein comprises a nuclease domain having nickase activity.

[0621] Embodiment 47. The CasX variant of any one of embodiments 1-45, wherein the CasX variant protein comprises a nuclease domain having double-stranded cleavage activity.

[0622] Embodiment 48. The CasX variant of any one of embodiments 1-45, wherein the CasX protein is a catalytically inactive CasX (dCasX) protein, and wherein the dCasX and the gNA retain the ability to bind to the target DNA.

[0623] Embodiment 49. The CasX variant of embodiment 48, wherein the dCasX comprises a mutation at residues:
[0624] a. D672, and/or E769, and/or D935 corresponding to the CasX protein of SEQ ID NO:1; or
[0625] b. D659, and/or E756, and/or D922 corresponding to the CasX protein of SEQ ID NO: 2.

[0626] Embodiment 50. The CasX variant of embodiment 49, wherein the mutation is a substitution of alanine for the residue.

[0627] Embodiment 51. The CasX variant of any one of embodiments ito 50, wherein the CasX variant comprises a first domain from a first CasX protein and second domain from a second CasX protein different from the first CasX protein.

[0628] Embodiment 52. The CasX variant of embodiment 51, wherein the first domain is selected from the group consisting of the NTSB, TSL, helical I, helical II, OBD, and RuvC domains.

[0629] Embodiment 53. The CasX variant of embodiment 51, wherein the second domain is selected from the group consisting of the NTSB, TSL, helical I, helical II, OBD, and RuvC domains.

[0630] Embodiment 54. The CasX variant of any one of embodiments 51 to 53, wherein the first and second domains are not the same domain.

[0631] Embodiment 55. The CasX variant of any one of embodiments 1 to 50, wherein the CasX variant comprises at least one chimeric domain comprising a first part from a first CasX protein and a second part from a second CasX protein different from the first CasX protein.

[0632] Embodiment 56. The CasX variant of embodiment 55, wherein the at least one chimeric domain is selected from the group consisting of the NTSB, TSL, helical I, helical II, OBD, and RuvC domains.

[0633] Embodiment 57. The CasX variant of embodiment 56, wherein the at least one chimeric domain comprises a chimeric RuvC domain.

[0634] Embodiment 58. The CasX variant of any one embodiments of 1 to 57, comprising a heterologous protein or domain thereof fused to the CasX.

[0635] Embodiment 59. The CasX variant of embodiment 58, wherein the heterologous protein or domain thereof is a base editor.

[0636] Embodiment 60. The CasX variant of embodiment 59, wherein the base editor is an adenosine deaminase, a cytosine deaminase or a guanine oxidase.

[0637] Embodiment 61. A variant of a reference guide nucleic acid scaffold (gNA variant) capable of binding a reference CasX protein or a CasX variant, wherein:
[0638] a. the gNA variant comprises at least one modification compared to the reference guide nucleic acid scaffold sequence; and
[0639] b. the gNA variant exhibits one or more improved characteristics compared to the reference guide nucleic acid scaffold.

[0640] Embodiment 62. The gNA variant of embodiment 61, wherein the one or more improved characteristics is selected from the group consisting of: improved stability; improved solubility; improved transcription of the gNA; improved resistance to nuclease activity; increased folding rate of the gNA; decreased side product formation during folding; increased productive folding; improved binding affinity to a CasX protein; improved binding affinity to a target DNA when complexed with the CasX protein; improved gene editing when complexed with the CasX protein; improved specificity of editing when complexed with the CasX protein; and improved ability to utilize a greater spectrum of one or more PAM sequences, including ATC, CTC, GTC, or TTC, in the editing of target DNA when complexed with the CasX protein.

[0641] Embodiment 63. The gNA variant of embodiment 61 or 62, wherein the reference guide scaffold comprises a sequence selected from the group consisting of the sequences of SEQ ID NOS: 4-16.

[0642] Embodiment 64. The gNA variant of any one of embodiments 61 to 63, wherein the at least one modification comprises:
[0643] a. at least one nucleotide substitution in a region of the gNA variant;
[0644] b. at least one nucleotide deletion in a region of the gNA variant;
[0645] c. at least one nucleotide insertion in a region of the gNA variant;
[0646] d. a substitution of all or a portion of a region of the gNA variant;
[0647] e. a deletion of all or a portion of a region of the gNA variant; or
[0648] f. any combination of (a)-(e).

[0649] Embodiment 65. The gNA variant of embodiment 64, wherein the region of the gNA variant is selected from the group consisting of extended stem loop, scaffold stem loop, triplex, and pseudoknot.

[0650] Embodiment 66. The gNA variant of embodiment 65, wherein the scaffold stem further comprises a bubble.

[0651] Embodiment 67. The gNA variant of embodiment 65 or embodiment 66, wherein the scaffold further comprises a triplex loop region.

[0652] Embodiment 68. The gNA variant of any one of embodiments 65-67, wherein the scaffold further comprises a 5′ unstructured region.

[0653] Embodiment 69. The gNA variant of any one of embodiments 64 to 68, wherein the at least one modification comprises:
[0654] a. a substitution of 1 to 15 consecutive or non-consecutive nucleotides in the gNA variant in one or more regions;
[0655] b. a deletion of 1 to 10 consecutive or non-consecutive nucleotides in the gNA variant in one or more regions;
[0656] c. an insertion of 1 to 10 consecutive or non-consecutive nucleotides in the gNA variant in one or more regions;
[0657] d. a substitution of the scaffold stem loop or the extended stem loop with an RNA stem loop sequence from a heterologous RNA source with proximal 5′ and 3′ ends; or
[0658] e. any combination of (a)-(d).

[0659] Embodiment 70. The gNA variant of any one of embodiments 61-69, comprising an extended stem loop region comprising at least 10, at least 100, at least 500, at least 1000, or at least 10,000 nucleotides.

[0660] Embodiment 71. The gNA variant of embodiment 69, wherein the heterologous RNA stem loop sequence increases the stability of the gNA.

[0661] Embodiment 72. The gNA variant of embodiment 71, wherein the heterologous RNA stem loop is capable of binding a protein, an RNA structure, a DNA sequence, or a small molecule.

[0662] Embodiment 73. The gNA variant of embodiment 71 or embodiment 72, wherein the heterologous RNA stem loop sequence is selected from MS2, QP, U1 hairpin II, Uvsx, or PP7 stem loops.

[0663] Embodiment 74. The gNA variant of any one of embodiments 61-73, the gNA variant comprises two or more modifications in one region.

[0664] Embodiment 75. The gNA variant of any one of embodiments 61-74, wherein the gNA variant comprises modifications in two or more regions.

[0665] Embodiment 76. The gNA variant of any one of embodiments 61-75, wherein the gNA variant further comprises a targeting sequence wherein the targeting sequence is complementary to the target DNA sequence.

[0666] Embodiment 77. The gNA variant of embodiment 76, wherein the targeting sequence has 14, 15, 16, 17, 18, 19, 20, 21, 22, 23, 24, 25, 26, 27, 28, 29, 30, 31, 32, 33, 34 or 35 nucleotides.

[0667] Embodiment 78. The gNA variant of any one of embodiments 76 or embodiment 77, wherein the targeting sequence has 20 nucleotides.

[0668] Embodiment 79. The gNA variant of any one of embodiments 76-78, wherein the gNA is a single-guide gNA comprising the scaffold sequence linked to the targeting sequence.

[0669] Embodiment 80. The gNA variant of any one of embodiments 61 to 79, wherein the one or more of the improved characteristics of the CasX variant is at least about 1.1 to about 100-fold or more improved relative to the reference gNA of SEQ ID NO: 4 or SEQ ID NO: 5.

[0670] Embodiment 81. The gNA variant of any one of embodiments 61 to 79, wherein one or more of the improved characteristics of the gNA variant is at least about 1.1, at least about 2, at least about 10, or at least about 100-fold or more improved relative to the reference gNA of SEQ ID NO: 4, reference gNA of SEQ ID NO: 5, variant scaffold SEQ ID NO: 2238, or variant scaffold SEQ ID NO: 2239.

[0671] Embodiment 82. The gNA variant of any one of embodiments 61-81, comprising a scaffold region having at least 60% sequence identity to SEQ ID NO: 4 or SEQ ID NO: 5 exclusive of the extended stem region.

[0672] Embodiment 83. The gNA variant of any one of embodiments 61-81, comprising a scaffold stem loop having at least 60% sequence identity to SEQ ID NO: 14.

[0673] Embodiment 84. The gNA variant of any one of embodiments 61-81, wherein the scaffold of the gNA variant sequence has at least 20%, at least 30%, at least 40%, at least 50%, at least 60%, or at least 70%, at least 80%, at least 85%, at least about 90%, at least about 95%, at least about 96%, at least about 97%, at least about 98%, or at least about 99% identity to the sequence of SEQ ID NO: 4, SEQ ID NO: 5, SEQ ID NO: 2238, or SEQ ID NO: 2239.

[0674] Embodiment 85. The gNA variant of any one of embodiments 61-81, the scaffold of the gNA variant sequence comprises a sequence selected from the group of sequences of SEQ ID NOS: 2101-2280, or 4433-4446, or having at least about 80%, at least about 90%, at least about 95%, at least about 96%, at least about 97%, at least about 98%, at least about 99% identity thereto.

[0675] Embodiment 86. The gNA variant of embodiment 85, wherein the scaffold of the gNA variant sequence consists of a sequence selected from the group of sequences of SEQ ID NOS: 2101-2280, or 4433-4446.

[0676] Embodiment 87. The gNA variant of any one of embodiments 61-86, further comprising one or more ribozymes.

[0677] Embodiment 88. The gNA variant of embodiment 87, wherein the one or more ribozymes are independently fused to a terminus of the gNA variant.

[0678] Embodiment 89. The gNA variant of embodiment 87 or embodiment 88, wherein at least one of the one or more ribozymes are an hepatitis delta virus (HDV) ribozyme, hammerhead ribozyme, pistol ribozyme, hatchet ribozyme, or tobacco ringspot virus (TRSV) ribozyme.

[0679] Embodiment 90. The gNA variant of any one of embodiments 61-89, further comprising a protein binding motif.

[0680] Embodiment 91. The gNA variant of any one of embodiments 61-90, further comprising a thermostable stem loop.

[0681] Embodiment 92. The gNA variant of any one of embodiments 61-91, wherein the gNA is chemically modified.

[0682] Embodiment 93. The gNA variant of any one of embodiments 61 to 92, wherein the gNA comprises a first region from a first gNA and a second region from a second gNA different from the first gNA.

[0683] Embodiment 94. The gNA variant of embodiment 93, wherein the first region is selected from the group consisting of a triplex region, a scaffold stem loop, and an extended stem loop.

[0684] Embodiment 95. The gNA variant of embodiment 93 or embodiment 94, wherein the second region is selected from the group consisting of a triplex region, a scaffold stem loop, and an extended stem loop.

[0685] Embodiment 96. The gNA variant of any one of embodiments 93 to 95, wherein the first and second regions are not the same region.

[0686] Embodiment 97. The gNA variant of any one of embodiments 93 to 95, wherein the first gNA comprises a sequence of SEQ ID NO: 4 and the second gNA comprises a sequence of SEQ ID NO: 5.

[0687] Embodiment 98. The gNA variant of any one of embodiments 61 to 97, comprising at least one chimeric region comprising a first part from a first gNA and a second part from a second gNA.

[0688] Embodiment 99. The gNA variant of embodiment 98, wherein the at least one chimeric region is selected from the group consisting of a triplex region, a scaffold stem loop, and an extended stem loop.

[0689] Embodiment 100. The gNA variant of embodiment 61, comprising the sequence of any one of any one of SEQ ID NOS: 2101-2280, or 4433-4446.

[0690] Embodiment 101. A gene editing pair comprising a CasX protein and a first gNA.

[0691] Embodiment 102. The gene editing pair of embodiment 101, wherein the CasX and the gNA are capable of associating together in a ribonuclear protein complex (RNP).

[0692] Embodiment 103. The gene editing pair of embodiment 101, wherein the CasX and the gNA are associated together in a ribonuclear protein complex (RNP).

[0693] Embodiment 104. The gene editing pair of any one of embodiments 101-103, wherein the first gNA comprises a gNA variant of any one of embodiments 76-100, a targeting sequence wherein the targeting sequence is complementary to the target DNA.

[0694] Embodiment 105. The gene editing pair of any one of embodiments 101-104, wherein the CasX comprises a CasX variant of any one of embodiments 1-60.

[0695] Embodiment 106. The gene editing pair of any one of embodiments 101 to 105, comprising:
[0696] a. a gNA variant of any one of embodiments 76-100, and
[0697] b. a CasX variant of any one of embodiments 1-60.

[0698] Embodiment 107. The gene editing pair of embodiment 106, wherein the gene editing pair of the CasX variant and the gNA variant has one or more improved characteristics compared to a gene editing pair comprising a reference CasX protein of SEQ ID NO: 1, SEQ ID NO: 2, or SEQ ID NO: 3, and a reference guide nucleic acid of SEQ ID NOS: 4 or 5.

[0699] Embodiment 108. The gene editing pair of embodiment 107, wherein the one or more improved characteristics comprises improved CasX:gNA (RNP) complex stability, improved binding affinity between the CasX and gNA, improved kinetics of RNP complex formation, higher percentage of cleavage-competent RNP, improved RNP binding affinity to a target DNA, ability to utilize an increased spectrum of PAM sequences, improved unwinding of the target DNA, increased editing activity, improved editing efficiency, improved editing specificity, increased nuclease activity, increased target strand loading for double strand cleavage, decreased target strand loading for single strand nicking, decreased off-target cleavage, improved binding of the non-target strand of DNA, or improved resistance to nuclease activity.

[0700] Embodiment 109. The gene editing pair of embodiment 107 or embodiment 108, wherein the at least one or more of the improved characteristics is at least about 1.1 to about 100-fold or more improved relative to a gene editing pair of the reference CasX protein and the reference guide nucleic acid.

[0701] Embodiment 110. The gene editing pair of embodiment 107 or 108, wherein one or more of the improved characteristics of the CasX variant is at least about 1.1, at least about 2, at least about 10, or at least about 100-fold or more improved relative to a gene editing pair of the reference CasX protein and the reference guide nucleic acid.

[0702] Embodiment 111. The gene editing pair of embodiment 107 or embodiment 108, wherein the improved characteristic comprises a 4 to 9 fold increase in editing activity compared to a reference editing pair of SEQ ID NO: 2 and SEQ ID NO: 5.

[0703] Embodiment 112. A composition comprising the gene editing pair of any one of embodiments 101-111, comprising:
[0704] a. a second gene editing pair comprising the CasX variant of any one of embodiments 1-60; and
[0705] b. a second gNA variant of any one of embodiments 61-100, wherein the second gNA variant has a targeting sequence complementary to a different or overlapping portion of the target DNA compared to the targeting sequence of the first gNA.

[0706] Embodiment 113. The gene editing pair of any one of embodiments 101-112, wherein the RNP of the CasX variant and the gNA variant has a higher percentage of cleavage-competent RNP compared to an RNP of a reference CasX protein and a reference guide nucleic acid.

[0707] Embodiment 114. The gene editing pair of any one of embodiments 101-113, wherein the RNP is capable of binding and cleaving a target DNA.

[0708] Embodiment 115. The gene editing pair of any one of embodiments 101-112, wherein the RNP is capable of binding a target DNA but is not capable of cleaving the target DNA.

[0709] Embodiment 116. The gene editing pair of any one of embodiments 101-112, wherein the RNP is capable of binding a target DNA and generating one or more single-stranded nicks in the target DNA.

[0710] Embodiment 117. A CasX variant comprising the amino acid sequence of any one of SEQ ID NO: 4416-4432 or 4597-4598.

[0711] Embodiment 118. A gNA variant comprising the amino acid sequence of any one of SEQ ID NO: 4433-4446.

### Set III

[0712] Embodiment 1. A variant of a reference CasX protein (CasX variant), wherein:
[0713] a. the CasX variant comprises at least one modification in the reference CasX protein; and
[0714] b. the CasX variant exhibits at least one improved characteristic as compared to the reference CasX protein,
[0715] optionally wherein the variant comprises a sequence selected from the group consisting of SEQ ID NOS: 89-101, 247-337, 411-592, and 760-982.

[0716] Embodiment 2. The CasX variant of embodiment 1, wherein the improved characteristic of the CasX variant is selected from the group consisting of: improved folding of the CasX variant; improved binding affinity to a guide nucleic acid (gNA); improved binding affinity to a target nucleic acid; improved ability to utilize a greater spectrum of one or more PAM sequences, including ATC, CTC, GTC, or TTC, in the editing of target nucleic acid; improved unwinding of the target nucleic acid; increased editing activity; improved editing efficiency; improved editing specificity; increased nuclease activity; increased target strand loading for double strand cleavage; decreased target strand loading for single strand nicking; decreased off-target cleavage; improved binding of non-target nucleic acid strand; improved protein stability; improved protein solubility; improved protein:gNA complex (RNP) stability; improved protein:gNA complex solubility; improved protein yield; improved protein expression; improved fusion characteristics or a combination thereof.

[0717] Embodiment 3. The Cas X variant of embodiment 1 or 2, wherein the at least one modification comprises:
[0718] a. at least one amino acid substitution in a domain of the CasX variant;
[0719] b. at least one amino acid deletion in a domain of the CasX variant;
[0720] c. at least one amino acid insertion in a domain of the CasX variant;
[0721] d. a substitution of all or a portion of a domain from a different CasX;
[0722] e. a deletion of all or a portion of a domain of the CasX variant; or
[0723] f. any combination of (a)-(e).

[0724] Embodiment 4. The CasX variant of any one of embodiments 1-3, wherein the reference CasX protein comprises the sequence of SEQ ID NO: 1, SEQ ID NO: 2, or SEQ ID NO: 3.

[0725] Embodiment 5. The CasX variant of any one of embodiments 1-4, wherein the at least one modification is in a domain selected from:
[0726] a. a non-target strand binding (NTSB) domain;
[0727] b. a target strand loading (TSL) domain;
[0728] c. a helical I domain;
[0729] d. a helical II domain;
[0730] e. an oligonucleotide binding domain (OBD); or
[0731] f. a RuvC DNA cleavage domain.

[0732] Embodiment 6. The CasX variant of embodiment 5, comprising at least one modification in the NTSB domain.

[0733] Embodiment 7. The CasX variant of embodiment 5, comprising at least one modification in the TSL domain.

[0734] Embodiment 8. The CasX variant of embodiment 5, comprising at least one modification in the helical I domain.

[0735] Embodiment 9. The CasX variant of any one of embodiments 5-8, comprising at least one modification in the helical II domain.

[0736] Embodiment 10. The CasX variant of embodiment 5, comprising at least one modification in the OBD domain.

[0737] Embodiment 11. The CasX variant of embodiment 5, comprising at least one modification in the RuvC DNA cleavage domain.

[0738] Embodiment 12. The CasX variant of any one of embodiments 5-11, wherein the modification results in an increased ability to edit the target nucleic acid.

[0739] Embodiment 13. The CasX variant of any one of the embodiments 1 to 12, wherein the CasX variant is capable of forming a ribonuclear protein complex (RNP) with a guide nucleic acid (gNA).

[0740] Embodiment 14. The CasX variant of any one of embodiments 1 to 13, wherein the at least one modification comprises:
[0741] a. a substitution of 1 to 100 consecutive or non-consecutive amino acids in the CasX variant;
[0742] b. a deletion of 1 to 100 consecutive or non-consecutive amino acids in the CasX variant;
[0743] c. an insertion of 1 to 100 consecutive or non-consecutive amino acids in the CasX; or
[0744] d. any combination of (a)-(c).

[0745] Embodiment 15. The CasX variant of embodiment 14, wherein the at least one modification comprises:
[0746] a. a substitution of 5-10 consecutive or non-consecutive amino acids in the CasX variant;
[0747] b. a deletion of 1-5 consecutive or non-consecutive amino acids in the CasX variant;
[0748] c. an insertion of 1-5 consecutive or non-consecutive amino acids in the CasX; or
[0749] d. any combination of (a)-(c).

[0750] Embodiment 16. The CasX variant of any one of embodiments 1 to 15, wherein the CasX variant comprises two or more modifications in one domain.

[0751] Embodiment 17. The CasX variant of any one of embodiments 1 to 16, wherein the CasX variant comprises modifications in two or more domains.

[0752] Embodiment 18. The CasX variant of any one of embodiments 1-15, comprising at least one modification of a region of non-contiguous amino acid residues of the CasX variant that form a channel in which gNA:target nucleic acid complexing with the CasX variant occurs.

[0753] Embodiment 19. The CasX variant of any one of embodiments 1-15, comprising at least one modification of a region of non-contiguous amino acid residues of the CasX variant that form an interface which binds with the gNA.

[0754] Embodiment 20. The CasX variant of any one of embodiments 1-15, comprising at least one modification of a region of non-contiguous amino acid residues of the CasX variant that form a channel which binds with the non-target strand DNA.

[0755] Embodiment 21. The CasX variant of any one of embodiments 1-15, comprising at least one modification of a region of non-contiguous amino acid residues of the CasX variant that form an interface which binds with the protospacer adjacent motif (PAM) of the target nucleic acid.

[0756] Embodiment 22. The CasX variant of any one of embodiments 1-15, comprising at least one modification of a region of non-contiguous surface-exposed amino acid residues of the CasX variant.

[0757] Embodiment 23. The CasX variant of any one of embodiments 1-15, comprising at least one modification of a region of non-contiguous amino acid residues that form a core through hydrophobic packing in a domain of the CasX variant.

[0758] Embodiment 24. The CasX variant of any one of embodiments 18-23, wherein the modification is one or more of a deletion, an insertion, or a substitution of one or more amino acids of the region.

[0759] Embodiment 25. The CasX variant of any one of embodiments 18-23, wherein between 2 to 15 amino acid residues of the region of the CasX variant are substituted with charged amino acids.

[0760] Embodiment 26. The CasX variant of any one of embodiments 18-23, wherein between 2 to 15 amino acid residues of a region of the CasX variant are substituted with polar amino acids.

[0761] Embodiment 27. The CasX variant of any one of embodiments 18-23, wherein between 2 to 15 amino acid residues of a region of the CasX variant are substituted with amino acids that stack with DNA or RNA bases.

[0762] Embodiment 28. The CasX variant of any one of embodiments 1-5, further comprising a substitution of an NTSB and/or a helical 1b domain from a different CasX.

[0763] Embodiment 29. The CasX variant of embodiment 28, wherein the substituted NTSB and/or the helical 1b domain is from the reference CasX of SEQ ID NO: 1.

[0764] Embodiment 30. The CasX variant of any one of embodiments 1-29, wherein the CasX variant has a sequence selected from the group consisting of SEQ ID NOS: 89-101, 247-337, 411-592, and 760-982, or a sequence having at least about 50%, at least about 60%, at least about 70%, at least about 80%, at least about 90%, or at least about 95%, or at least about 96%, or at least about 97%, or at least about 98%, or at least about 99%, sequence identity thereto.

[0765] Embodiment 31. The CasX variant of any one of embodiments 1 to 30, further comprising one or more nuclear localization signals (NLS).

[0766] Embodiment 32. The CasX variant of embodiment 31, wherein the one or more NLS are selected from the group of sequences consisting of PKKKRKV (SEQ ID NO: 352), KRPAATKKAGQAKKKK (SEQ ID NO: 353), PAAKRVKLD (SEQ ID NO: 354), RQRRNELKRSP (SEQ ID NO: 355), NQSSNFGPMKGGNFGGRSSGPYGGGGQYFAKPRNQGGY (SEQ ID NO: 356), RMRIZFKNKGKDTAELRRRRVEVSVELRKAKKDEQILKRRNV (SEQ ID NO: 357), VSRKRPRP (SEQ ID NO: 358), PPKKARED (SEQ ID NO: (359), PQPKKKPL (SEQ ID NO: 360), SALIKKKKKMAP (SEQ ID NO: 361), DRLRR (SEQ ID NO: 362), PKQKKRK (SEQ ID NO: 363), RKLKKKIKKL (SEQ ID NO: 364), REKKKFLKRR (SEQ ID NO: 365), KRKGDEVDGVDEVAKKKSKK (SEQ ID NO: 366), RKCLQAGMNLEARKTKK (SEQ ID NO: 367), PRPRKIPR (SEQ ID NO: 368), PPRKKRTVV (SEQ ID NO: 369), NLSKKKKRKREK (SEQ ID NO: 370), RRPSRPFRKP (SEQ ID NO: 371), KRPRSPSS (SEQ ID NO: 372), KRGINDRNFWRGENERKTR (SEQ ID NO: 373), PRPPKMARYDN (SEQ ID NO: 374), KRSFSKAF (SEQ ID NO: 375), KLKIKRPVK (SEQ ID NO: 376), PKKKRKVPPPPAAKRVKLD (SEQ ID NO: 377), PKTRRRPRRSQRKRPPT (SEQ ID NO: 378), SRRRKANPTKLSENAKKLAKEVEN (SEQ ID NO: 379), KTRRRPRRSQRKRPPT (SEQ ID NO: 380), RRKKRRPRRKKRR (SEQ ID NO: 381), PKKKSRKPKKKSRK (SEQ ID NO: 382), HKKKHPDASVNFSEFSK (SEQ ID NO: 383), QRPGPYDRPQRPGPYDRP (SEQ ID NO: 384), LSPSLSPLLSPSLSPL (SEQ ID NO: 385), RGKGGKGLGKGGAKRHRK (SEQ ID NO: 386), PKRGRGRPKRGRGR (SEQ ID NO: 387), PKKKRKVPPPPKKKRKV (SEQ ID NO: 389), PAKRARRGYKC (SEQ ID NO: 63), KLGPRKATGRW (SEQ ID NO: 64), PRRKREE (SEQ ID NO: 65), PYRGRKE (SEQ ID NO: 66), PLRKRPRR (SEQ ID NO: 67), PLRKRPRRGSPLRKRPRR (SEQ ID NO:68), PAAKRVKLDGGKRTADGSEFESPKKKRKV (SEQ ID NO:69), PAAKRVKLDGGKRTADGSEFESPKKKRKVGIHGVPAA (SEQ ID NO:70), PAAKRVKLDGGKRTADGSEFESPKKKRKVAEAAAKEAAAKEAAAKA (SEQ ID NO:71), PAAKRVKLDGGKRTADGSEFESPKKKRKVPG (SEQ ID NO:72), KRKGSPERGERKRHW (SEQ ID NO:73), KRTADSQHSTPPKTKRKVEFEPKKKRKV (SEQ ID NO:74), and PKKKRKVGGSKRTADSQHSTPPKTKRKVEFEPKKKRKV (SEQ ID NO:75) and, optionally, the one or more NLS are linked to the CasX variant or to adjacent NLS with a linker peptide wherein the linker peptide is selected from the group consisting of (G)n (SEQ ID NO: 1023), (GS)n (SEQ ID NO: 1024), (GSGGS)n (SEQ ID NO: 399), (GGSGGS)n (SEQ ID NO: 400), (GGGS)n (SEQ I DNO: 401), GGSG (SEQ ID NO: 402), GGSGG (SEQ ID NO: 403), GSGSG (SEQ ID NO: 404), GSGGG (SEQ ID NO: 405), GGGSG (SEQ ID NO: 406), GSSSG (SEQ ID NO: 407), GPGP (SEQ ID NO: 408), GGP, PPP, PPAPPA (SEQ ID NO: 409), PPPG (SEQ ID NO: 24), PPPGPPP (SEQ ID NO: 410), PPP(GGGS)n (SEQ ID NO: 25), (GGGS)nPPP (SEQ ID NO: 26), AEAAAKEAAAKEAAAKA (SEQ ID NO: 1025), and TPPKTKRKVEFE (SEQ ID NO: 27), where n is 1 to 5.

[0767] Embodiment 33. The CasX variant of embodiment 31 or embodiment 32, wherein the one or more NLS are positioned at or near the C-terminus of the CasX protein.

[0768] Embodiment 34. The CasX variant of embodiment 31 or embodiment 32, wherein the one or more NLS are positioned at or near at the N-terminus of the CasX protein.

[0769] Embodiment 35. The CasX variant of embodiment 31 or embodiment 32, comprising at least two NLS, wherein the at least two NLS are positioned at or near the N-terminus and at or near the C-terminus of the CasX protein.

[0770] Embodiment 36. The CasX variant of any one of embodiments 2-35, wherein one or more of the improved characteristics of the CasX variant is at least about 1.1 to about 100-fold or more improved relative to the reference CasX protein of SEQ ID NO: 1, SEQ ID NO: 2, or SEQ ID NO: 3, when compared in an in vitro assay under comparable conditions.

[0771] Embodiment 37. The CasX variant of embodiment 2-35, wherein one or more of the improved characteristics of the CasX variant is at least about 1.1, at least about 2, at least about 10, at least about 100-fold or more improved relative to the CasX protein of SEQ ID NO: 1, SEQ ID NO: 2, SEQ ID NO: 3, SEQ ID NO: 270, or SEQ ID NO: 336, when compared in an in vitro assay under comparable conditions.

[0772] Embodiment 38. The CasX variant of any one of embodiments 2-37, wherein the improved characteristic comprises editing efficiency, and the CasX variant comprises a 1.1 to 100-fold improvement in editing efficiency of the target nucleic acid compared to the CasX protein of SEQ ID NO: 270 or SEQ ID NO: 336, when compared in an in vitro assay under comparable conditions.

[0773] Embodiment 39. The CasX variant of any one of embodiments 1 to 38, wherein an RNP comprising the CasX variant exhibits greater editing efficiency and/or binding of a sequence in the target nucleic acid when any one of the PAM sequences TTC, ATC, GTC, or CTC is located 1 nucleotide 5′ to the non-target strand of the protospacer having identity with the targeting sequence of the gNA in an in vitro cellular assay system compared to the editing efficiency and/or binding of an RNP comprising a reference CasX protein in a comparable assay system.

[0774] Embodiment 40. The CasX variant of embodiment 39, wherein the PAM sequence is TTC.

[0775] Embodiment 41. The CasX variant of embodiment 39, wherein the PAM sequence is ATC.

[0776] Embodiment 42. The CasX variant of embodiment 39, wherein the PAM sequence is CTC.

[0777] Embodiment 43. The CasX variant of embodiment 39, wherein the PAM sequence is GTC.

[0778] Embodiment 44. The CasX variant of any one of embodiments 39-43, wherein the improved editing efficiency and/or binding to the target nucleic acid by the RNP comprising the CasX variant is at least about 1.1 to about 100-fold improved relative to the RNP comprising the reference CasX.

[0779] Embodiment 45. The CasX variant of any one of embodiments 1 to 44, wherein the CasX variant comprises between 400 and 2000 amino acids.

[0780] Embodiment 46. The CasX variant of any one of embodiments 1 to 45, wherein the CasX variant protein comprises a nuclease domain having nickase activity.

[0781] Embodiment 47. The CasX variant of any one of embodiments 1-45, wherein the CasX variant protein comprises a nuclease domain having double-stranded cleavage activity.

[0782] Embodiment 48. The CasX variant of any one of embodiments 1-37, wherein the CasX protein is a catalytically inactive CasX (dCasX) protein, and wherein the dCasX and the gNA retain the ability to bind to the target nucleic acid, and optionally wherein the dCasX protein comprises a sequence of SEQ ID NOS: 44-62.

[0783] Embodiment 49. The CasX variant of embodiment 48, wherein the dCasX comprises a mutation at residues:
[0784] a. D672, and/or E769, and/or D935 corresponding to the CasX protein of SEQ ID NO:1; or
[0785] b. D659, and/or E756, and/or D922 corresponding to the CasX protein of SEQ ID NO: 2.

[0786] Embodiment 50. The CasX variant of embodiment 49, wherein the mutation is a substitution of alanine for the residue.

[0787] Embodiment 51. The CasX variant of any one of embodiments ito 50, wherein the CasX variant comprises a first domain from a first CasX protein and second domain from a second CasX protein different from the first CasX protein.

[0788] Embodiment 52. The CasX variant of embodiment 51, wherein the first domain is selected from the group consisting of the NTSB, TSL, helical I, helical II, OBD, and RuvC domains.

[0789] Embodiment 53. The CasX variant of embodiment 51, wherein the second domain is selected from the group consisting of the NTSB, TSL, helical I, helical II, OBD, and RuvC domains.

[0790] Embodiment 54. The CasX variant of any one of embodiments 51 to 53, wherein the first and second domains are not the same domain.

[0791] Embodiment 55. The CasX variant of any one of embodiments 1 to 50, wherein the CasX variant comprises at least one chimeric domain comprising a first part from a first CasX protein and a second part from a second CasX protein different from the first CasX protein.

[0792] Embodiment 56. The CasX variant of embodiment 55, wherein the at least one chimeric domain is selected from the group consisting of the NTSB, TSL, helical I, helical II, OBD, and RuvC domains.

[0793] Embodiment 57. The CasX variant of embodiment 56, wherein the at least one chimeric domain comprises a chimeric RuvC domain.

[0794] Embodiment 58. The CasX variant of any one of embodiments of 1 to 57, comprising a heterologous protein or domain thereof fused to the CasX.

[0795] Embodiment 59. The CasX variant of embodiment 58, wherein the heterologous protein or domain thereof is a base editor.

[0796] Embodiment 60. The CasX variant of embodiment 59, wherein the base editor is an adenosine deaminase, a cytosine deaminase or a guanine oxidase.

[0797] Embodiment 61. A variant of a reference guide nucleic acid scaffold (gNA variant) capable of binding a reference CasX protein or a CasX variant, wherein:
[0798] a. the gNA variant comprises at least one modification compared to the reference guide nucleic acid scaffold sequence; and
[0799] b. the gNA variant exhibits one or more improved characteristics compared to the reference guide nucleic acid scaffold, optionally wherein the variant comprises a sequence selected from the group consisting of SEQ ID NOS: 2101-2332.

[0800] Embodiment 62. The gNA variant of embodiment 61, wherein the one or more improved characteristics is selected from the group consisting of: improved stability; improved solubility; improved transcription of the gNA; improved resistance to nuclease activity; increased folding rate of the gNA; decreased side product formation during folding; increased productive folding; improved binding affinity to a CasX protein; improved binding affinity to a target nucleic acid when complexed with the CasX protein; improved gene editing when complexed with the CasX protein; improved specificity of editing when complexed with the CasX protein; and improved ability to form cleavage competent RNP when complexed with the CasX protein.

[0801] Embodiment 63. The gNA variant of embodiment 61 or 62, wherein the reference guide scaffold comprises a sequence selected from the group consisting of the sequences of SEQ ID NOS: 4-16.

[0802] Embodiment 64. The gNA variant of any one of embodiments 61 to 63, wherein the at least one modification comprises:
[0803] a. at least one nucleotide substitution in a region of the gNA variant;
[0804] b. at least one nucleotide deletion in a region of the gNA variant;
[0805] c. at least one nucleotide insertion in a region of the gNA variant;
[0806] d. a substitution of all or a portion of a region of the gNA variant;
[0807] e. a deletion of all or a portion of a region of the gNA variant; or
[0808] f. any combination of (a)-(e).

[0809] Embodiment 65. The gNA variant of embodiment 64, wherein the region of the gNA variant is selected from the group consisting of extended stem loop, scaffold stem loop, triplex, and pseudoknot.

[0810] Embodiment 66. The gNA variant of embodiment 65, wherein the scaffold stem further comprises a bubble.

[0811] Embodiment 67. The gNA variant of embodiment 65 or embodiment 66, wherein the scaffold further comprises a triplex loop region.

[0812] Embodiment 68. The gNA variant of any one of embodiments 65-67, wherein the scaffold further comprises a 5′ unstructured region.

[0813] Embodiment 69. The gNA variant of any one of embodiments 64 to 68, wherein the at least one modification comprises:
[0814] a. a substitution of 1 to 15 consecutive or non-consecutive nucleotides in the gNA variant in one or more regions;
[0815] b. a deletion of 1 to 10 consecutive or non-consecutive nucleotides in the gNA variant in one or more regions;
[0816] c. an insertion of 1 to 10 consecutive or non-consecutive nucleotides in the gNA variant in one or more regions;
[0817] d. a substitution of or insertion into the scaffold stem loop or the extended stem loop with an RNA stem loop sequence from a heterologous RNA source with proximal 5′ and 3′ ends; or
[0818] e. any combination of (a)-(d).

[0819] Embodiment 70. The gNA variant of any one of embodiments 61-69, the gNA variant comprises two or more modifications in one region.

[0820] Embodiment 71. The gNA variant of any one of embodiments 61-69, wherein the gNA variant comprises modifications in two or more regions.

[0821] Embodiment 72. The gNA variant of any one of embodiments 61-71, comprising an extended stem loop region comprising at least 10, at least 100, at least 500, at least 1000, or at least 10,000 nucleotides.

[0822] Embodiment 73. The gNA variant of embodiment 72, wherein the heterologous RNA stem loop sequence increases the stability of the gNA.

[0823] Embodiment 74. The gNA variant of embodiment 72 or embodiment 73, wherein the heterologous RNA stem loop is capable of binding a protein, an RNA structure, a DNA sequence, or a small molecule.

[0824] Embodiment 75. The gNA variant of embodiment 74, wherein the heterologous RNA stem loop sequence inserted in the extended stem loop is selected from MS2 hairpin, QP hairpin, U1 hairpin II, Uvsx hairpin, or PP7 hairpin, wherein the heterologous stem loop is capable of binding MS2 coat protein, QP coat protein, U1A signal recognition particle, Uvsx protein of T4 phage, or PP7 coat protein, respectively.

[0825] Embodiment 76. The gNA variant of any one of embodiments 61-75, wherein the modification comprises an insertion in the extended stem loop of one or more components selected from the group consisting of:
[0826] a. Stem IIB of Rev response element (RRE),
[0827] b. Stem II-V of RRE;
[0828] c. Stem II of RRE;
[0829] d. Rev-binding element (RBE) of Stem IIB; and
[0830] e. and full-length RRE,
[0831] wherein the one or more components are capable of binding Rev.

[0832] Embodiment 77. The gNA variant of any one of embodiments 61-76, wherein the gNA variant further comprises a targeting sequence, wherein the targeting sequence is complementary to the target nucleic acid sequence.

[0833] Embodiment 78. The gNA variant of embodiment 77, wherein the targeting sequence has 14, 15, 16, 17, 18, 19, 20, 21, 22, 23, 24, 25, 26, 27, 28, 29, 30, 31, 32, 33, 34 or 35 nucleotides.

[0834] Embodiment 79. The gNA variant of embodiment 78, wherein the targeting sequence has 18, 19, or 20 nucleotides.

[0835] Embodiment 80. The gNA variant of embodiment 79, wherein an RNP comprising the gNA variant having a targeting sequence of 18 nucleotides exhibits greater editing efficiency of at least 2-fold, at least 3-fold, or at least 4-fold compared to an RNP comprising the gNA variant having a targeting sequence of 20 nucleotides, when assayed in an in vitro cell-based assay under comparable conditions.

[0836] Embodiment 81. The gNA variant of embodiment 79, wherein an RNP comprising the gNA variant having a targeting sequence of 19 nucleotides exhibits greater editing efficiency of at least 2-fold, at least 3-fold, or at least 4-fold compared to an RNP comprising the gNA variant having a targeting sequence of 20 nucleotides, when assayed in an in vitro cell-based assay under comparable conditions.

[0837] Embodiment 82. The gNA variant of any one of embodiments 77-79 or, wherein the targeting sequence has 20 nucleotides.

[0838] Embodiment 83. The gNA variant of any one of embodiments 77-80, wherein the gNA is a single-guide gNA comprising the scaffold sequence linked to the targeting sequence.

[0839] Embodiment 84. The gNA variant of any one of embodiments 61 to 83, wherein the one or more of the improved characteristics of the gNA variant is at least about 1.1 to about 100-fold or more improved relative to the reference gNA of SEQ ID NO: 4 or SEQ ID NO: 5.

[0840] Embodiment 85. The gNA variant of any one of embodiments 61 to 83, wherein one or more of the improved characteristics of the gNA variant is at least about 1.1, at least about 2, at least about 10, or at least about 100-fold or more improved relative to the reference gNA of SEQ ID NO: 4, reference gNA of SEQ ID NO: 5, variant scaffold SEQ ID NO: 2238, variant scaffold SEQ ID NO: 2239, Variant Scaffold 174 (SEQ ID NO: 2238), or Variant Scaffold 175 (SEQ ID NO: 2239).

[0841] Embodiment 86. The gNA variant of any one of embodiments 61-85, comprising a scaffold region having at least 60% sequence identity to SEQ ID NO: 4 or SEQ ID NO: 5 exclusive of the extended stem region.

[0842] Embodiment 87. The gNA variant of any one of embodiments 61-85, comprising a scaffold stem loop having at least 60% sequence identity to SEQ ID NO: 14.

[0843] Embodiment 88. The gNA variant of any one of embodiments 61-85, wherein the scaffold of the gNA variant sequence has at least 20%, at least 30%, at least 40%, at least 50%, at least 60%, or at least 70%, at least 80%, at least 85%, at least about 90%, at least about 95%, at least about 96%, at least about 97%, at least about 98%, or at least about 99% identity to the sequence of SEQ ID NO: 4, SEQ ID NO: 5, SEQ ID NO: 2238, or SEQ ID NO: 2239.

[0844] Embodiment 89. The gNA variant of any one of embodiments 61-85, wherein the scaffold of the gNA variant sequence comprises a sequence selected from the group of sequences of SEQ ID NOS: 2101-2332, or a sequence having at least about 80%, at least about 90%, at least about 95%, at least about 96%, at least about 97%, at least about 98%, at least about 99% identity thereto.

[0845] Embodiment 90. The gNA variant of embodiment 89, wherein the scaffold of the gNA variant sequence consists of a sequence selected from the group consisting of SEQ ID NOS: 2101-2332.

[0846] Embodiment 91. The gNA variant of any one of embodiments 61-90, further comprising one or more ribozymes.

[0847] Embodiment 92. The gNA variant of embodiment 91, wherein the one or more ribozymes are independently fused to a terminus of the gNA variant.

[0848] Embodiment 93. The gNA variant of embodiment 91 or embodiment 92, wherein at least one of the one or more ribozymes are an hepatitis delta virus (HDV) ribozyme, hammerhead ribozyme, pistol ribozyme, hatchet ribozyme, or tobacco ringspot virus (TRSV) ribozyme.

[0849] Embodiment 94. The gNA variant of any one of embodiments 61-93, further comprising a thermostable stem loop.

[0850] Embodiment 95. The gNA variant of any one of embodiments 61-94, wherein the gNA is chemically modified.

[0851] Embodiment 96. The gNA variant of any one of embodiments 61 to 95, wherein the gNA comprises a first region from a first gNA and a second region from a second gNA different from the first gNA.

[0852] Embodiment 97. The gNA variant of embodiment 96, wherein the first region is selected from the group consisting of a triplex region, a scaffold stem loop, and an extended stem loop.

[0853] Embodiment 98. The gNA variant of embodiment 96 or embodiment 97, wherein the second region is selected from the group consisting of a triplex region, a scaffold stem loop, and an extended stem loop.

[0854] Embodiment 99. The gNA variant of any one of embodiments 96 to 98, wherein the first and second regions are not the same region.

[0855] Embodiment 100. The gNA variant of any one of embodiments 96 to 98, wherein the first gNA comprises a sequence of SEQ ID NO: 4 and the second gNA comprises a sequence of SEQ ID NO: 5.

[0856] Embodiment 101. The gNA variant of any one of embodiments 61 to 100, comprising at least one chimeric region comprising a first part from a first gNA and a second part from a second gNA.

[0857] Embodiment 102. The gNA variant of embodiment 101, wherein the at least one chimeric region is selected from the group consisting of a triplex region, a scaffold stem loop, and an extended stem loop.

[0858] Embodiment 103. The gNA variant of embodiment 61, comprising a sequence of any one of any one of SEQ ID NOS: 2101-2332.

[0859] Embodiment 104. A gene editing pair comprising a CasX variant protein and a first gNA variant.

[0860] Embodiment 105. The gene editing pair of embodiment 104, wherein the CasX variant protein and the gNA variant are capable of associating together in a ribonuclear protein complex (RNP).

[0861] Embodiment 106. The gene editing pair of embodiment 104, wherein the CasX variant and the gNA variant are associated together in a ribonuclear protein complex (RNP).

[0862] Embodiment 107. The gene editing pair of any one of embodiments 104-107, wherein the first gNA comprises a gNA variant of any one of embodiments 77-103, and a targeting sequence wherein the targeting sequence is complementary to the target nucleic acid.

[0863] Embodiment 108. The gene editing pair of any one of embodiments 104-107, wherein the CasX variant comprises a CasX variant of any one of embodiments 1-60.

[0864] Embodiment 109. The gene editing pair of any one of embodiments 104 to 108, comprising:
[0865] a. a gNA variant of any one of embodiments 77-103, and
[0866] b. a CasX variant of any one of embodiments 1-60.

[0867] Embodiment 110. The gene editing pair of embodiment 109, wherein the gene editing pair of the CasX variant and the gNA variant has one or more improved characteristics compared to a gene editing pair comprising a reference CasX protein of SEQ ID NO: 1, SEQ ID NO: 2, or SEQ ID NO: 3, and a reference guide nucleic acid of SEQ ID NOS: 4 or 5.

[0868] Embodiment 111. The gene editing pair of embodiment 110, wherein the one or more improved characteristics comprises improved CasX:gNA (RNP) complex stability, improved binding affinity between the CasX and gNA, improved kinetics of RNP complex formation, higher percentage of cleavage-competent RNP, improved RNP binding affinity to a target nucleic acid, ability to utilize an increased spectrum of PAM sequences, improved unwinding of the target nucleic acid, increased editing activity, improved editing efficiency, improved editing specificity, increased nuclease activity, increased target strand loading for double strand cleavage, decreased target strand loading for single strand nicking, decreased off-target cleavage, improved binding of the non-target strand of DNA, or improved resistance to nuclease activity.

[0869] Embodiment 112. The gene editing pair of embodiment 110 or embodiment 111, wherein the improved characteristic is enhanced editing efficiency of a target nucleic acid utilizing a non-canonical PAM sequence of ATC, GTC or CTC compared to a gene editing pair comprising a reference CasX protein of SEQ ID NO: 1, SEQ ID NO: 2, or SEQ ID NO: 3 or CasX variant 119 or 491, and a reference guide nucleic acid of SEQ ID NOS: 4 or 5 or a gNA variant of 174 (SEQ ID NO: 2238).

[0870] Embodiment 113. The gene editing pair of embodiment 110, wherein the at least one or more of the improved characteristics is at least about 1.1 to about 100-fold or more improved relative to a gene editing pair of the reference CasX protein and the reference guide nucleic acid.

[0871] Embodiment 114. The gene editing pair of embodiment 110, wherein one or more of the improved characteristics of the CasX variant is at least about 1.1, at least about 2, at least about 4, at least about 6, at least about 6, at least about 10, or at least about 100-fold or more improved relative to a gene editing pair of the reference CasX protein and the reference guide nucleic acid or a gNA variant of 174 (SEQ ID NO: 2238).

[0872] Embodiment 115. The gene editing pair of embodiment 110, wherein the improved characteristic comprises a 4- to 9-fold increase in editing efficiency compared to a reference editing pair of SEQ ID NO: 2 and SEQ ID NO: 5 or a gNA variant of 174 (SEQ ID NO: 2238), when assayed in an in vitro assay under comparable conditions.

[0873] Embodiment 116. The gene editing pair of any one of embodiments 104-115, wherein the RNP of the CasX variant and the gNA variant has a higher percentage of cleavage-competent RNP compared to an RNP of a reference CasX protein and a reference guide nucleic acid.

[0874] Embodiment 117. The gene editing pair of clam 116, wherein the RNP of the CasX variant and the gNA variant has at least a 2-fold, at least a 3-fold, at least a 4-fold, or at least a 5-fold higher percentage of cleavage-competent RNP compared to the RNP of the reference CasX protein and the reference guide nucleic acid.

[0875] Embodiment 118. The gene editing pair of any one of embodiments 104-117, wherein the RNP is capable of binding and cleaving a target nucleic acid.

[0876] Embodiment 119. The gene editing pair of any one of embodiments 104-118, wherein the RNP of the CasX variant and the gNA variant exhibit a specificity ratio within at least 10%, or at least 15%, or at least 20% compared to the reference editing pair of SEQ ID NO: 2 and SEQ ID NO: 5 or a gNA variant of 174 (SEQ ID NO: 2238), when assayed in an in vitro assay for on-target/off-target editing under comparable conditions.

[0877] Embodiment 120. The gene editing pair of any one of embodiments 104-111, wherein the RNP is capable of binding a target nucleic acid but is not capable of cleaving the target nucleic acid.

[0878] Embodiment 121. The gene editing pair of any one of embodiments 104-117, wherein the RNP is capable of binding a target nucleic acid and generating one or more single-stranded nicks in the target nucleic acid.

[0879] Embodiment 122. A composition comprising the gene editing pair of any one of embodiments 104-119, comprising:
[0880] a. a second gene editing pair comprising the CasX variant of any one of embodiments 1-60; and
[0881] b. a second gNA variant of any one of embodiments 61-103, wherein the second gNA variant has a targeting sequence complementary to a different or overlapping portion of the target nucleic acid compared to the targeting sequence of the first gNA.

[0882] Embodiment 123. A CasX variant comprising the amino acid sequence of any one of SEQ ID NOS: 89-101, 247-337, 411-592, or 760-982.

[0883] Embodiment 124. A gNA variant comprising the amino acid sequence of any one of SEQ ID NOS: 2101-2332.

[0884] Embodiment 125. The gene editing pair of any one of embodiments 104-121 for use as a medicament for the treatment of a subject having a disease.

### Set IV

[0885] Embodiment 1. A guide RNA (gRNA) scaffold comprising a sequence having at least 60%, at least 70%, at least 80%, at least 90%, at least 95%, at least 98%, at least 99%, or 100% sequence identity to any one of the sequences selected from the group consisting of SEQ ID NOS: 2292, 2291, 2307, 2281-2290, 2293-2306, 2308-2332 and 23530-2398.

[0886] Embodiment 2. The gRNA scaffold of embodiment 1, comprising a sequence selected from the group consisting of SEQ ID NOS: 2292, 2291, 2307, 2281-2290, 2293-2306, 2308-2332 and 23530-2398.

[0887] Embodiment 3. The gRNA scaffold of embodiment 1, comprising a sequence having one or more modifications relative to SEQ ID NO: 2238, wherein the one or more modifications result in an improved characteristic.

[0888] Embodiment 4. The gRNA scaffold of embodiment 3, wherein the one or more modifications comprise one or more nucleotide substitutions, insertions, and/or deletions as set forth in Table 19.

[0889] Embodiment 5. The gRNA scaffold of embodiment 3 or embodiment 4, wherein the improved characteristic is one or more functional properties selected from the group consisting of increased editing activity, increased pseudoknot stem stability, increased triplex region stability, increased scaffold stem stability, extended stem stability, reduced off-target folding intermediates, and increased binding affinity to a Class 2, Type V CRISPR protein, optionally in an in vitro assay.

[0890] Embodiment 6. The gRNA scaffold of any one of embodiments 3 to 5, wherein the gRNA scaffold exhibits an improved enrichment score (log 2) of at least about 2.0, at least about 2.5, at least about 3, or at least about 3.5 greater compared to the score of the gRNA scaffold of SEQ ID NO: 2238 in an in vitro assay.

[0891] Embodiment 7. The gRNA scaffold of embodiment 1, comprising a sequence having one or more modifications relative to SEQ ID NO: 2239, wherein the one or more modifications result in an improved characteristic.

[0892] Embodiment 8. The gRNA scaffold of embodiment 7, wherein the one or more modifications comprise one or more nucleotide substitutions, insertions, and/or deletions as set forth in Table 20.

[0893] Embodiment 9. The gRNA scaffold of embodiment 7 or embodiment 8, wherein the improved characteristic is one or more functional properties selected from the group consisting of increased editing activity, increased pseudoknot stem stability, increased triplex region stability, increased scaffold stem stability, extended stem stability, reduced off-target folding intermediates, and increased binding affinity to a Class 2, Type V CRISPR protein, optionally in an in vitro assay.

[0894] Embodiment 10. The gRNA scaffold of any one of embodiments 7 to 9, wherein the gRNA scaffold exhibits an improved enrichment score (log 2) of at least about 1.2, at least about 1.5, at least about 2.0, at least about 2.5, at least about 3, or at least about 3.5 greater compared to the score of the gRNA scaffold of SEQ ID NO: 2239 in an in vitro assay.

[0895] Embodiment 11. The gRNA scaffold of embodiment 1, comprising one or more modifications at positions relative to the sequence of SEQ ID NO: 2239 selected from the group consisting of C9, U11, C17, U24, A29, U54, G64, A88, and A95.

[0896] Embodiment 12. The gRNA scaffold of embodiment 11, comprising one or more modifications relative to the sequence of SEQ ID NO: 2239 selected from the group consisting of C9U, U11C, C17G, U24C, A29C, an insertion of G at position 54, an insertion of C at position 64, A88G, and A95G.

[0897] Embodiment 13. The gRNA scaffold of embodiment 12, comprising modifications relative to the sequence of SEQ ID NO: 2239 consisting of C9U, U11C, C17G, U24C, A29C, an insertion of G at position 54, an insertion of C at position 64, A88G, and A95G.

[0898] Embodiment 14. The gRNA scaffold of any one of embodiments 7 to 13, wherein the improved characteristic is selected from the group consisting of pseudoknot stem stability, triplex region stability, scaffold bubble stability, extended stem stability, and binding affinity to a Class 2, Type V CRISPR protein.

[0899] Embodiment 15. The gRNA scaffold of embodiment 14, wherein the insertion of C at position 64 and the A88G substitution relative to the sequence of SEQ ID NO: 2239 resolves an asymmetrical bulge element of the extended stem, enhancing the stability of the extended stem of the gRNA scaffold.

[0900] Embodiment 16. The gRNA scaffold of embodiment 14, wherein the substitutions of U11C, U24C, and A95G increase the stability of the triplex region of the gRNA scaffold.

[0901] Embodiment 17. The gRNA scaffold of embodiment 14, wherein the substitution of A29C increases the stability of the pseudoknot stem.

[0902] Embodiment 18. The gRNA scaffold of embodiment 1 or embodiment 2, wherein the gRNA scaffold comprises one or more heterologous RNA sequences in the extended stem.

[0903] Embodiment 19. The gRNA scaffold of embodiment 18, wherein the heterologous RNA is selected from the group consisting of a MS2 hairpin, QP hairpin, U1 hairpin II, Uvsx hairpin, and a PP7 stem loop, or sequence variants thereof.

[0904] Embodiment 20. The gRNA scaffold of embodiment 18 or embodiment 19, wherein the heterologous RNA sequence increases the stability of the gRNA.

[0905] Embodiment 21. The gRNA scaffold of embodiment 18 or embodiment 19, wherein the heterologous RNA is capable of binding a protein, a RNA, a DNA, or a small molecule.

[0906] Embodiment 22. The gRNA scaffold of any one of embodiments 18 to 21, wherein the gRNA scaffold comprises a Rev response element (RRE) or a portion thereof.

[0907] Embodiment 23. The gRNA scaffold of embodiment 22, wherein the RRE or portion thereof is selected from the group consisting of Stem IIB of the RRE having sequence UGGGCGCAGCGUCAAUGACGCUGACGGUACA (SEQ ID NO: 1280), Stem II-V of the RRE having sequence CAGGAAGCACUAUGGGCGCAGCGUCAAUGACGCUGACGGUACAGGCCAGACAAU UAUUGUCUGGUAUAGUGCAGCAGCAGAACAAUUUGCUGAGGGCUAUUGAGGCGC AACAGCAUCUGUUGCAACUCACAGUCUGGGGCAUCAAGCAGCUCCAGGCAAGAA UCCUG (SEQ ID NO: 1282), Stem II of the RRE having sequence GCACUAUGGGCGCAGCGUCAAUGACGCUGACGGUACAGGCCAGACAAUUAUUGU CUGGUAUAGUGC (SEQ ID NO: 1281), Rev-binding element (RBE) of Stem IIB having sequence GCUGACGGUACAGGC (SEQ ID NO: 1284), and full-length RRE having sequence AGGAGCUUUGUUCCUUGGGUUCUUGGGAGCAGCAGGAAGCACUAUGGGCGCAGC GUCAAUGACGCUGACGGUACAGGCCAGACAAUUAUUGUCUGGUAUAGUGCAGCA GCAGAACAAUUUGCUGAGGGCUAUUGAGGCGCAACAGCAUCUGUUGCAACUCAC AGUCUGGGGCAUCAAGCAGCUCCAGGCAAGAAUCCUGGCUGUGGAAAGAUACCU AAAGGAUCAACAGCUCCU (SEQ ID NO: 1283).

[0908] Embodiment 24. The gRNA of any one of embodiments 1 to 23, wherein the gRNA scaffold comprises one or more thymines (T).

[0909] Embodiment 25. A gRNA comprising the gRNA scaffold of any one of embodiments 1 to 24, and a targeting sequence at the 3′ end of the gRNA scaffold that is complementary to a target nucleic acid sequence.

[0910] Embodiment 26. The gRNA of embodiment 25, wherein the targeting sequence has 10, 11, 12, 13, 14, 15, 16, 17, 18, 19, 20, 21, 22, 23, 24, 25, 26, 27, 28, 29, or 30 nucleotides.

[0911] Embodiment 27. The gRNA of embodiment 26, wherein the targeting sequence has 18, 19, or 20 nucleotides.

[0912] Embodiment 28. The gRNA of any one of embodiments 25 to 27, wherein the gRNA is capable of forming a ribonucleoprotein (RNP) complex with a Class 2, Type V CRISPR protein.

[0913] Embodiment 29. An engineered Class 2, Type V CRISPR protein comprising:
[0914] a. a NTSB domain comprising a sequence of QPASKKIDQNKLKPEMDEKGNLTTAGFACSQCGQPLFVYKLEQVSEKGKAYTNYFGRC NVAEHEKLILLAQLKPEKDSDEAVTYSLGKFGQ (SEQ ID NO: 2335), or a sequence having at least 80% at least 90%, at least 95%, at least 96%, at least 97%, at least 98% or at least 99% identity thereto;
[0915] b. a helical I-II domain comprising a sequence of RALDFYSIHVTKESTHPVKPLAQIAGNRYASGPVGKALSDACMGTIASFLSKYQDIIIEH QKVVKGNQKRLESLRELAGKENLEYPSVTLPPQPHTKEGVDAYNEVIARVRMWVNLN LWQKLKLSRDDAKPLLRLKGFPSF (SEQ ID NO: 2336), or a sequence having at least 80%, at least 90%, at least 95%, at least 96%, at least 97%, at least 98% or at least 99% identity thereto;
[0916] c. a helical II domain comprising a sequence of PLVERQANEVDWWDMVCNVKKLINEKKEDGKVFWQNLAGYKRQEALRPYLSSEEDR KKGKKFARYQLGDLLLHLEKKHGEDWGKVYDEAWERIDKKVEGLSKHIKLEEERRSE DAQSKAALTDWLRAKASFVIEGLKEADKDEFCRCELKLQKWYGDLRGKPFAIEAE (SEQ ID NO: 2351), or a sequence having at least 80%, at least 90%, at least 95%, at least 96%, at least 97%, at least 98% or at least 99% identity thereto; and
[0917] d. a RuvC-I domain comprising a sequence of SSNIKPMNLIGVDRGENIPAVIALTDPEGCPLSRFKDSLGNPTHILRIGESYKEKQRTIQAK KEVEQRRAGGYSRKYASKAKNLADDMVRNTARDLLYYAVTQDAMLIFENLSRGFGRQ GKRTFMAERQYTRMEDWLTAKLAYEGLPSKTYLSKTLAQYTSKTC (SEQ ID NO: 2352), or a sequence having at least 80%, at least 90%, at least 95%, at least 96%, at least 97%, at least 98% or at least 99% identity thereto.

[0918] Embodiment 30. The Class 2, Type V CRISPR protein of embodiment 29, wherein the CRISPR protein comprises an OBD-I domain comprising a sequence of QEIKRINKIRRRLVKDSNTKKAGKTGPMKTLLVRVMTPDLRERLENLRKKPENIPQ (SEQ ID NO: 2342), or a sequence having at least 80%, at least 90%, at least 95%, at least 96%, at least 97%, at least 98%, or at least 99% identity thereto.

[0919] Embodiment 31. The Class 2, Type V CRISPR protein of embodiment 29 or embodiment 30, wherein the CRISPR protein comprises an OBD-II domain comprising a sequence of NSILDISGFSKQYNCAFIWQKDGVKKLNLYLIINYFKGGKLRFKKIKPEAFEANRFYTVIN KKSGEIVPMEVNFNFDDPNLIILPLAFGKRQGREFIWNDLLSLETGSLKLANGRVIEKTL YNRRTRQDEPALFVALTFERREVLD (SEQ ID NO: 2347), or a sequence having at least 80%, at least 90%, at least 95%, at least 96%, at least 97%, at least 98%, or at least 99% identity thereto.

[0920] Embodiment 32. The Class 2, Type V CRISPR protein of any one of embodiments 29 to 31, wherein the CRISPR protein comprises a helical I-I domain comprising a sequence of PISNTSRANLNKLLTDYTEMKKAILHVYWEEFQKDPVGLMSRVA (SEQ ID NO: 2343), or a sequence having at least 80%, at least 90%, at least 95%, at least 96%, at least 97%, at least 98%, or at least 99% identity thereto.

[0921] Embodiment 33. The Class 2, Type V CRISPR protein of any one of embodiments 29 to 32, wherein the CRISPR protein comprises a TSL domain comprising a sequence of SNCGFTITSADYDRVLEKLKKTATGWMTTINGKELKVEGQITYYNRYKRQNVVKDLSV ELDRLSEESVNNDISSWTKGRSGEALSLLKKRFSHRPVQEKFVCLNCGFETH (SEQ ID NO: 2349), or a sequence having at least 80%, at least 90%, at least 95%, at least 96%, at least 97%, at least 98%, or at least 99% identity thereto.

[0922] Embodiment 34. The Class 2, Type V CRISPR protein of any one of embodiments 29 to 33, wherein the CRISPR protein comprises a RuvC-II domain comprising a sequence of ADEQAALNIARSWLFLRSQEYKKYQTNKTTGNTDKRAFVETWQSFYRKKLKEVWKPA V (SEQ ID NO: 2350), or a sequence having at least 80%, at least 90%, at least 95%, at least 96%, at least 97%, at least 98%, or at least 99% identity thereto.

[0923] Embodiment 35. The Class 2, Type V CRISPR protein of embodiment 34, comprising the sequence of SEQ ID NO: 416, or a sequence having at least 80%, at least 90%, at least 95%, at least 96%, at least 97%, at least 98%, or at least 99% identity thereto.

[0924] Embodiment 36. The Class 2, Type V CRISPR protein of any one of embodiments 29 to 35, wherein the Class 2, Type V CRISPR protein comprises at least one modification in one or more domains.

[0925] Embodiment 37. The Class 2, Type V CRISPR protein of embodiment 36, wherein the at least one modification comprises:
[0926] a. at least one amino acid substitution in a domain;
[0927] b. at least one amino acid deletion in a domain;
[0928] c. at least one amino acid insertion in a domain; or
[0929] d. any combination of (a)-(c).

[0930] Embodiment 38. The Class 2, Type V CRISPR protein of embodiment 36 or embodiment 37, comprising a modification at one or more amino acid positions in the NTSB domain relative to SEQ ID NO: 2335 selected from the group consisting of P2, S4, Q9, E15, G20, G33, L41, Y51, F55, L68, A70, E75, K88, and G90.

[0931] Embodiment 39. The Class 2, Type V CRISPR protein of embodiment 38, wherein the one or more modifications at one or more amino acid positions in the NTSB domain are selected from the group consisting of an insertion of G at position 2, an insertion of I at position 4, an insertion of L at position 4, Q9P, E15S, G20D, a deletion of S at position 30, G33T, L41A, Y51T, F55V, L68D, L68E, L68K, A70Y, A70S, E75A, E75D, E75P, K88Q, and G90Q relative to SEQ ID NO: 2335.

[0932] Embodiment 40. The Class 2, Type V CRISPR protein of any one of embodiments 36 to 39, comprising a modification at one or more amino acid positions in the helical I-II domain relative to SEQ ID NO: 2336 selected from the group consisting of 124, A25, Y29 G32, G44, S48, S51, Q54, 156, V63, S73, L74, K97, V100, M112, L116, G137, F138, and S140.

[0933] Embodiment 41. The Class 2, Type V CRISPR protein of embodiment 40, wherein the one or more modifications at one or more amino acid positions in the helical I-II domain are selected from the group consisting of an insertion of T at position 24, an insertion of C at position 25, Y29F,G32Y, G32N, G32H, G32S, G32T, G32A, G32V, a deletion of G at position 32, G32S, G32T, G44L, G44H, S48H, S48T, S51T, Q54H, I56T, V63T, S73H, L74Y, K97G, K97S, K97D, K97E, V100L, M112T, Mi12W, M112R, Mi12K, L116K, G137R, G137K, G137N, an insertion of Q at position 138, and S140Q relative to SEQ ID NO: 2336.

[0934] Embodiment 42. The Class 2, Type V CRISPR protein of any one of embodiments 36 to 41, comprising a modification at one or more amino acid positions in the helical II domain relative to SEQ ID NO: 2351 selected from the group consisting of L2, V3, E4, R5, Q6, A7, E9, V10, D1I, W12, W13, D14, M15, V16, C17, N18, V19, K2O, L22, 123, E25, K26, K31, Q35, L37, A38, K41,R 42, Q43, E44, L46, K57, Y65, G68, L70, L71, L72, E75, G79, D81, W82, K84, V85, Y86, D87, 193, K95, K96, E98, L100, K102, 1104, K105, E109, R110, D114, K118, A120, L121, W124, L125, R126, A127, A129, 1133, E134, G135, L136, E138, D140, K141, D142, E143, F144, C145, C147, E148, L149, K150, L151, Q152, K153, L158, E166, and A167.

[0935] Embodiment 43. The Class 2, Type V CRISPR protein of embodiment 42, wherein the one or more modifications at one or more amino acid positions in the helical II domain are selected from the group consisting of an insertion of A at position 2, an insertion of H at position 2, a deletion of L at position 2 and a deletion of V at position 3, V3E, V3Q, V3F, a deletion of V at position 3, an insertion of D at position 3, V3P, E4P, a deletion of E at position 4, E4D, E4L, E4R, R5N, Q6V, an insertion of Q at position 6, an insertion of G at position 7, an insertion of H at position 9, an insertion of A at position 9, VD10, an insertion of T1 at position 0, a deletion of V at position 10, an insertion of F at position 10, an insertion of D at position 11, a deletion of D at position 11, D11S, a deletion of W at position 12, W12T, W12H, an insertion of P at position 12, an insertion of Q at position 13, an insertion of G at position 12, an insertion of R at position 13, W13P, W13D, an insertion of D at position 13, W13L, an insertion of P at position 14, an insertion of D at position 14, a deletion of D at position 14 and a deletion of M at position 15, a deletion of M at position 15, an insertion of T at position 16, an insertion of P at position 17, N18I, V19N, V19H, K20D, L22D, I23S, E25C, E25P, an insertion of G at position 25, K26T, K27E, K31L, K31Y, Q35D, Q35P, an insertion of S at position 37, a deletion of L at position 37 and a deletion of A at position 38, K41L, an insertion of R at position 42, a deletion of Q at position 43 and a deletion of E at position 44, L46N, K57Q, Y65T, G68M, L70V, L71C, L72D, L72N, L72W, L72Y, E75F, E75L, E75Y,G79P, an insertion of E at position 79, an insertion of T at position 81, an insertion of R at position 81, an insertion of W at position 81, an insertion of Y at position 81, an insertion of W at position 82, an insertion of Y at position 82, W82G, W82R, K84D, K84H, K84P, K84T, V85L, V85A, an insertion of L at position 85, Y86C, D87G, D87M, D87P, I93C, K95T, K96R, E98G, L100A, K102H, I104T, I104S, I104Q, K105D, an insertion of K at position 109, E109L, R11D, a deletion of R at position 110, D114E, an insertion of D at position 114, K118P, A120R, L121T, W124L, L125C, R126D, A127E, A127L, A129T, A129K, 1133E, an insertion of C at position 133, an insertion of S at position 134, an insertion of G at position 134, an insertion of R at position 135, G135P, L136K, L136D, L136S, L136H, a deletion of E at position 138, D140R, an insertion of D at position 140, an insertion of P at position 141, an insertion of D at position 142, a deletion of E at position 143+a deletion of F at position 144, an insertion of Q at position 143, F144K, a deletion of F at position 144, a deletion of F at position 144 and a deletion of C at position 145, C145R, an insertion of G at position 145, C145K, C147D, an insertion of V at position 148, E148D, an insertion of H at position 149, L149R, K150R, L151H, Q152C, K153P, L158S, E166L, and an insertion of F at position 167 relative to SEQ ID NO: 2351.

[0936] Embodiment 44. The Class 2, Type V CRISPR protein of any one of embodiments 36 to 43, comprising a modification at one or more amino acid positions in the RuvC-I domain relative to SEQ ID NO: 2352 selected from the group consisting of 14, K5, P6, M7, N8, L9, V12, G49, K63, K80, N83, R90, M125, and L146.

[0937] Embodiment 45. The Class 2, Type V CRISPR protein of embodiment 44, wherein the one or more modifications at one or more amino acid positions in the RuvC-I domain are selected from the group consisting of an insertion of I at position 4, an insertion of S at position 5, an insertion of T at position 6, an insertion of N at position 6, an insertion of R at position 7, an insertion of K at position 7, an insertion of H at position 8, an insertion of S at position 8, V12L, G49W, G49R, S51R, S51K, K62S, K62T, K62E, V65A, K80E, N83G, R90H, R90G, M125S, M125A, L137Y, an insertion of P at position 137, a deletion of L at position 141, L141R, L141D, an insertion of Q at position 142, an insertion of R at position 143, an insertion of N at position 143, E144N, an insertion of P at position 146, L146F, P147A, K149Q, T150V, an insertion of R at position 152, an insertion of H153, T155Q, an insertion of H at position 155, an insertion of R at position 155, an insertion of L at position 156, a deletion of L at position 156, an insertion of W at position 156, an insertion of A at position 157, an insertion of F at position 157, A157S, Q158K, a deletion of Y at position 159, T160Y, T160F, an insertion of I at position 161, S161P, T163P, an insertion of N at position 163, C164K, and C164M relative to SEQ ID NO: 2351.

[0938] Embodiment 46. The Class 2, Type V CRISPR protein of any one of embodiments 36 to 45, comprising a modification at one or more amino acid positions in the OBD-I domain relative to SEQ ID NO: 2342 selected from the group consisting of 13, K4, R5, 16, N7, K8, K15, D16, N18, P27, M28, V33, R34, M36, R41, L47, R48, E52, P55, and Q56.

[0939] Embodiment 47. The Class 2, Type V CRISPR protein of embodiment 46, wherein the one or more modifications at one or more amino acid positions in the OBD-I domain are selected from the group consisting of an insertion of G at position 3, I3G, 13E, an insertion of G at position 4, K4G, K4P, K4S, K4W, K4W, R5P, an insertion of P at position 5, an insertion of G at position 5, RSS, an insertion of S at position 5, R5A, R5P, R5G, R5L, I6A, I6L, an insertion of G at position 6, N7Q, N7L, N7S, K8G, K15F, D16W, an insertion of F at position 16, an insertion of F18, an insertion of P at position 27, M28P, M28H, V33T, R34P, M36Y, R41P, L47P, an insertion of P at position 48, E52P, an insertion of P at position 55, a deletion of P at position 55 and a deletion of Q at position 56, Q56S, Q56P, an insertion of D at position 56, an insertion of T at position 56, and Q56P relative to SEQ ID NO: 2342.

[0940] Embodiment 48. The Class 2, Type V CRISPR protein of any one of embodiments 36 to 47, comprising a modification at one or more amino acid positions in the OBD-II domain relative to SEQ ID NO: 2347 selected from the group consisting of S2, 13, L4, K11, V24, K37, R42, A53, T58, K63, M70, 182, Q92, G93, K110, L121, R124, R141, E143, V144, and L145.

[0941] Embodiment 49. The Class 2, Type V CRISPR protein of embodiment 48, wherein the one or more modifications at one or more amino acid positions in the OBD-II domain are selected from the group consisting of a deletion of S at position 2, I3R, 13K, a deletion of I at position 3 and a deletion of L4, a deletion of L at position 4, K11T, an insertion of P at position 24, K37G, R42E, an insertion of S at position 53, an insertion of R at position 58, a deletion of K at position 63, M70T, I82T, Q92I, Q92F, Q92V, Q92A, an insertion of A at position 93, K110Q, R115Q, L121T, an insertion of A at position 124, an insertion of R at position 141, an insertion of D at position 143, an insertion of A at position 143, an insertion of W at position 144, and an insertion of A at position 145 relative to SEQ ID NO: 2342.

[0942] Embodiment 50. The Class 2, Type V CRISPR protein of any one of embodiments 36 to 49, comprising a modification at one or more amino acid positions in the TSL domain relative to SEQ ID NO: 2349 selected from the group consisting of S1, N2, C3, G4, F5, 17, K18, V58, S67, T76, G78, S80, G81, E82, S85, V96, and E98.

[0943] Embodiment 51. The Class 2, Type V CRISPR protein of embodiment 50, wherein the one or more modifications at one or more amino acid positions in the OBD-II domain are selected from the group consisting of an insertion of M at position 1, a deletion of N at position 2, an insertion of V at position 2, C3S, an insertion of G at position 4, an insertion of W at position 4, F5P, an insertion of W at position 7, K18G, V58D, an insertion of A at position 67, T76E, T76D, T76N, G78D, a deletion of S at position 80, a deletion of G at position 81, an insertion of E at position 82, an insertion of N at position 82, S85I, V96C, V96T, and E98D relative to SEQ ID NO: 2349.

[0944] Embodiment 52. The Class 2, Type V CRISPR protein of any one of embodiments 29 to 51, exhibiting an improved characteristic relative to SEQ ID NO: 2, wherein the improved characteristic comprises increased binding affinity to a gRNA, increased binding affinity to the target nucleic acid, improved ability to utilize a greater spectrum of PAM sequences in the editing of the target nucleic acid, improved unwinding of the target nucleic acid, increased editing activity, improved editing efficiency, improved editing specificity for cleavage of the target nucleic acid, decreased off-target editing or cleavage of the target nucleic acid, increased percentage of a eukaryotic genome that can be edited, increased activity of the nuclease, increased target strand loading for double strand cleavage, decreased target strand loading for single strand nicking, increased binding of the non-target strand of DNA, improved protein stability, increased protein:gRNA (RNP) complex stability, and improved fusion characteristics.

[0945] Embodiment 53. The Class 2, Type V CRISPR protein of embodiment 52, wherein the improved characteristic comprises increased cleavage activity at a target nucleic sequence comprising an TTC, ATC, GTC, or CTC PAM sequence.

[0946] Embodiment 54. The Class 2, Type V CRISPR protein of embodiment 53, wherein the improved characteristic comprises increased cleavage activity at a target nucleic acid sequence comprising an ATC or CTC PAM sequence relative to cleavage activity of the sequence of SEQ ID NO: 416.

[0947] Embodiment 55. The Class 2, Type V CRISPR protein of embodiment 54, wherein the improved cleavage activity is an enrichment score (log 2) of at least about 1.5, at least about 2.0, at least about 2.5, at least about 3, at least about 3.5, at least about 4, at least about 4.5, at least about 5, at least about 6, at least about 7, at least about 8 or more greater compared to score of the sequence of SEQ ID NO: 416 in an in vitro assay.

[0948] Embodiment 56. The Class 2, Type V CRISPR protein of embodiment 54, wherein the improved characteristic comprises increased cleavage activity at a target nucleic acid sequence comprising an CTC PAM sequence relative to the sequence of SEQ ID NO: 416.

[0949] Embodiment 57. The Class 2, Type V CRISPR protein of embodiment 56, wherein the improved cleavage activity is an enrichment score (log 2) of at least about 2, at least about 2.5, at least about 3, at least about 3.5, at least about 4, at least about 4.5, at least about 5, or at least about 6 or more greater compared to the score of the sequence of SEQ ID NO: 416 in an in vitro assay.

[0950] Embodiment 58. The Class 2, Type V CRISPR protein of embodiment 53, wherein the improved characteristic comprises increased cleavage activity at a target nucleic acid sequence comprising an TTC PAM sequence relative to the sequence of SEQ ID NO: 416.

[0951] Embodiment 59. The Class 2, Type V CRISPR protein of embodiment 58, wherein the improved cleavage activity is an enrichment score of at least about 1.5, at least about 2.0, at least about 2.5, at least about 3, at least about 3.5, at least about 4, at least about 4.5, at least about 5, or at least about 6 log₂ or more greater compared to the sequence of SEQ ID NO: 416 in an in vitro assay.

[0952] Embodiment 60. The Class 2, Type V CRISPR protein of embodiment 52, wherein the improved characteristic comprises increased specificity for cleavage of the target nucleic acid sequence relative to the sequence of SEQ ID NO: 416.

[0953] Embodiment 61. The Class 2, Type V CRISPR protein of embodiment 60, wherein the increased specificity is an enrichment score of at least about 2.0, at least about 2.5, at least about 3, at least about 3.5, at least about 4, at least about 4.5, at least about 5, or at least about 6 log₂ or more greater compared to the sequence of SEQ ID NO: 416 in an in vitro assay.

[0954] Embodiment 62. The Class 2, Type V CRISPR protein of embodiment 52, wherein the improved characteristic comprises decreased off-target cleavage of the target nucleic acid sequence.

[0955] Embodiment 63. The Class 2, Type V CRISPR protein of any one of embodiments 29 to 62, wherein the Class 2, Type V CRISPR protein has a sequence selected from the group consisting of the sequences of SEQ ID NOS: 415-592 and 1147-1231, as set forth in Table 3, or a sequence having at least about 50%, at least about 60%, at least about 70%, at least about 80%, at least about 90%, or at least about 95%, or at least about 96%, or at least about 97%, or at least about 98%, or at least about 99%, sequence identity thereto.

[0956] Embodiment 64. The Class 2, Type V CRISPR protein of any one of embodiments 29 to 62, comprising a sequence selected from the group consisting of SEQ ID NOS: 415-592 and 1147-1231, as set forth in Table 3.

[0957] Embodiment 65. The Class 2, Type V CRISPR protein of any one of embodiments 29 to 64, comprising one or more nuclear localization signals (NLS).

[0958] Embodiment 66. The Class 2, Type V CRISPR protein of embodiment 65, wherein the one or more NLS are selected from the group of sequences consisting of PKKKRKV (SEQ ID NO: 352), KRPAATKKAGQAKKKK (SEQ ID NO: 353), PAAKRVKLD (SEQ ID NO: 354), RQRRNELKRSP (SEQ ID NO: 355), NQSSNFGPMKGGNFGGRSSGPYGGGGQYFAKPRNQGGY (SEQ ID NO: 356), RMRIZFKNKGKDTAELRRRRVEVSVELRKAKKDEQILKRRNV (SEQ ID NO: 357), VSRKRPRP (SEQ ID NO: 358), PPKKARED (SEQ ID NO: (359), PQPKKKPL (SEQ ID NO: 360), SALIKKKKKMAP (SEQ ID NO: 361), DRLRR (SEQ ID NO: 362), PKQKKRK (SEQ ID NO: 363), RKLKKKIKKL (SEQ ID NO: 364), REKKKFLKRR (SEQ ID NO: 365), KRKGDEVDGVDEVAKKKSKK (SEQ ID NO: 366), RKCLQAGMNLEARKTKK (SEQ ID NO: 367), PRPRKIPR (SEQ ID NO: 368), PPRKKRTVV (SEQ ID NO: 369), NLSKKKKRKREK (SEQ ID NO: 370), RRPSRPFRKP (SEQ ID NO: 371), KRPRSPSS (SEQ ID NO: 372), KRGINDRNFWRGENERKTR (SEQ ID NO: 373), PRPPKMARYDN (SEQ ID NO: 374), KRSFSKAF (SEQ ID NO: 375), KLKIKRPVK (SEQ ID NO: 376), PKKKRKVPPPPAAKRVKLD (SEQ ID NO: 377), PKTRRRPRRSQRKRPPT (SEQ ID NO: 378), SRRRKANPTKLSENAKKLAKEVEN (SEQ ID NO: 379), KTRRRPRRSQRKRPPT (SEQ ID NO: 380), RRKKRRPRRKKRR (SEQ ID NO: 381), PKKKSRKPKKKSRK (SEQ ID NO: 382), HKKKHPDASVNFSEFSK (SEQ ID NO: 383), QRPGPYDRPQRPGPYDRP (SEQ ID NO: 384), LSPSLSPLLSPSLSPL (SEQ ID NO: 385), RGKGGKGLGKGGAKRHRK (SEQ ID NO: 386), PKRGRGRPKRGRGR (SEQ ID NO: 387), PKKKRKVPPPPKKKRKV (SEQ ID NO: 389), PAKRARRGYKC (SEQ ID NO: 63), KLGPRKATGRW (SEQ ID NO: 64), PRRKREE (SEQ ID NO: 65), PYRGRKE (SEQ ID NO: 66), PLRKRPRR (SEQ ID NO: 67), PLRKRPRRGSPLRKRPRR (SEQ ID NO:68), PAAKRVKLDGGKRTADGSEFESPKKKRKV (SEQ ID NO:69), PAAKRVKLDGGKRTADGSEFESPKKKRKVGIHGVPAA (SEQ ID NO:70), PAAKRVKLDGGKRTADGSEFESPKKKRKVAEAAAKEAAAKEAAAKA (SEQ ID NO:71), PAAKRVKLDGGKRTADGSEFESPKKKRKVPG (SEQ ID NO:72), KRKGSPERGERKRHW (SEQ ID NO:73), KRTADSQHSTPPKTKRKVEFEPKKKRKV (SEQ ID NO:74), and PKKKRKVGGSKRTADSQHSTPPKTKRKVEFEPKKKRKV (SEQ ID NO:75), and, optionally, wherein the one or more NLS are linked to the Class 2, Type V CRISPR protein or to an adjacent NLS with a linker peptide wherein the linker peptide is selected from the group consisting of SR, RS, (G)n (SEQ ID NO: 1023), (GS)n (SEQ ID NO: 1024), (GSGGS)n (SEQ ID NO: 399), (GGSGGS)n (SEQ ID NO: 400), (GGGS)n (SEQ I DNO: 401), GGSG (SEQ ID NO: 402), GGSGG (SEQ ID NO: 403), GSGSG (SEQ ID NO: 404), GSGGG (SEQ ID NO: 405), GGGSG (SEQ ID NO: 406), GSSSG (SEQ ID NO: 407), GPGP (SEQ ID NO: 408), GGP, PPP, PPAPPA (SEQ ID NO: 409), PPPG (SEQ ID NO: 24), PPPGPPP (SEQ ID NO: 410), PPP(GGGS)n (SEQ ID NO: 25), (GGGS)nPPP (SEQ ID NO: 26), AEAAAKEAAAKEAAAKA (SEQ ID NO: 1025), and TPPKTKRKVEFE (SEQ ID NO: 27), wherein n is 1 to 5.

[0959] Embodiment 67. The Class 2, Type V CRISPR protein of embodiment 65 or embodiment 66, wherein the one or more NLS are positioned at or near the C-terminus of the protein.

[0960] Embodiment 68. The Class 2, Type V CRISPR protein of embodiment 65 or embodiment 66, wherein the one or more NLS are positioned at or near at the N-terminus of the protein.

[0961] Embodiment 69. The Class 2, Type V CRISPR protein of embodiment 65 or embodiment 66, comprising at least two NLS, wherein the at least two NLS are positioned at or near the N-terminus and at or near the C-terminus of the protein.

[0962] Embodiment 70. The Class 2, Type V CRISPR protein of any one of embodiments 29 to 69, wherein the Class 2, Type V CRISPR protein is capable of forming a ribonuclear protein complex (RNP) with a gRNA.

[0963] Embodiment 71. The Class 2, Type V CRISPR protein of embodiment 70, wherein the RNP exhibits at least one or more improved characteristics as compared to a an RNP of a reference protein of any one of SEQ ID NOS: 1-3 and a gRNA of SEQ ID NO: 4 or SEQ ID NO: 5.

[0964] Embodiment 72. The Class 2, Type V CRISPR protein of embodiment 71, wherein the improved characteristic is selected from the group consisting of increased binding affinity to a guide nucleic acid (gRNA); increased binding affinity to a target nucleic acid; improved ability to utilize a greater spectrum of one or more PAM sequences, including ATC, CTC, GTC, or TTC, in the editing of target nucleic acid; increased unwinding of the target nucleic acid; increased editing activity; increased editing efficiency; increased editing specificity of the target nucleic acid; increased nuclease activity; increased target strand loading for double strand cleavage; decreased target strand loading for single strand nicking; decreased off-target cleavage of the target nucleic acid; increased binding of non-target nucleic acid strand; and increased protein:gRNA complex (RNP) stability.

[0965] Embodiment 73. The Class 2, Type V CRISPR protein of embodiment 71 or embodiment 72, wherein the improved characteristic of the RNP is at least about 1.1 to about 100,000-fold increased relative to the RNP of the reference protein of SEQ ID NO: 1, SEQ ID NO: 2, or SEQ ID NO: 3 and the gRNA of SEQ ID NO: 4 or SEQ ID NO: 5.

[0966] Embodiment 74. The Class 2, Type V CRISPR protein of embodiment 71 or embodiment 72, wherein the improved characteristic of the RNP is at least about 10-fold, at least about 100-fold, at least about 1,000-fold, or at least about 10,000-fold increased relative to the RNP of the reference protein of SEQ ID NO: 1, SEQ ID NO: 2, or SEQ ID NO: 3 and the gRNA of SEQ ID NOS: 4 or 5.

[0967] Embodiment 75. The Class 2, Type V CRISPR protein of any one of embodiments 71 to 74, wherein the improved characteristic of the RNP comprises a 1.1 to 100-fold improvement in editing efficiency compared to the RNP of the reference protein of SEQ ID NO: 2 and the gRNA comprising of SEQ ID NOS: 4 or 5.

[0968] Embodiment 76. A gene editing pair comprising a gRNA and a Class 2, Type V CRISPR protein, the pair comprising:
[0969] a. a gRNA of any one of embodiments 25 to 28; and
[0970] b. a Class 2, Type V CRISPR protein of any one of embodiments 29 to 75.

[0971] Embodiment 77. The gene editing pair of embodiment 76, wherein the gRNA and the Class 2, Type V CRISPR protein are capable of forming a ribonuclear protein complex (RNP).

[0972] Embodiment 78. The gene editing pair of embodiment 76 or embodiment 77, wherein the gRNA and the Class 2, Type V CRISPR protein are associated together as a ribonuclear protein complex (RNP).

[0973] Embodiment 79. The gene editing pair of embodiment 77 or embodiment 78, wherein an RNP of the Class 2, Type V CRISPR protein and the gRNA exhibit at least one or more improved characteristics as compared to an RNP of a reference protein of SEQ ID NO: 1, SEQ ID NO: 2, or SEQ ID NO: 3 and a gRNA comprising a sequence of SEQ ID NO: 4 or SEQ ID NO: 5.

[0974] Embodiment 80. The gene editing pair of embodiment 79, wherein the improved characteristic is selected from one or more of the group consisting of increased binding affinity of the Class 2, Type V CRISPR protein to the gRNA; increased binding affinity to a target nucleic acid; increased ability to utilize a greater spectrum of one or more PAM sequences, including ATC, CTC, GTC, or TTC, in the editing of target nucleic acid; increased unwinding of the target nucleic acid; increased editing activity; increased editing efficiency; increased editing specificity of the target nucleic acid; increased nuclease activity; increased target strand loading for double strand cleavage; decreased target strand loading for single strand nicking; decreased off-target cleavage of the target nucleic acid; increased binding of non-target nucleic acid strand; increased protein:gRNA complex (RNP) stability; and increased fusion characteristics.

[0975] Embodiment 81. The gene editing pair of embodiment 79 or embodiment 80, wherein the improved characteristic of the RNP of the Class 2, Type V CRISPR protein and the gRNA is at least about 1.1 to about 100-fold or more increased relative to the RNP of the reference protein of SEQ ID NO: 1, SEQ ID NO: 2, or SEQ ID NO: 3 and the gRNA comprising a sequence of SEQ ID NO: 4 or SEQ ID NO: 5 in a comparable in vitro assay system.

[0976] Embodiment 82. The gene editing pair of embodiment 79 or embodiment 80, wherein the improved characteristic of the Class 2, Type V CRISPR protein is at least about 1.1, at least about 2, at least about 10, at least about 100-fold or more increased relative to the reference protein of SEQ ID NO: 1, SEQ ID NO: 2, or SEQ ID NO: 3 and the gRNA comprising a sequence of SEQ ID NO: 4 or SEQ ID NO: 5 in a comparable in vitro assay system.

[0977] Embodiment 83. The gene editing pair of any one of embodiments 77 to 82, wherein the RNP comprising the Class 2, Type V CRISPR protein and the gRNA exhibits greater editing efficiency and/or binding of a target nucleic acid sequence in the target nucleic acid when any one of the PAM sequences TTC, ATC, GTC, or CTC is located 1 nucleotide 5′ to the non-target strand of the protospacer having identity with the targeting sequence of the gRNA in a cellular assay system compared to the editing efficiency and/or binding of an RNP comprising a reference protein of SEQ ID NO: 1, SEQ ID NO: 2, or SEQ ID NO: 3 and a reference gRNA in a comparable assay system.

[0978] Embodiment 84. The gene editing pair of embodiment 83, wherein the PAM sequence is TTC.

[0979] Embodiment 85. The gene editing pair of embodiment 83, wherein the PAM sequence is ATC.

[0980] Embodiment 86. The gene editing pair of embodiment 83, wherein the PAM sequence is CTC.

[0981] Embodiment 87. The gene editing pair of embodiment 83, wherein the PAM sequence is GTC.

[0982] Embodiment 88. The gene editing pair of any one of embodiments 83 to 87, wherein the RNP comprising the Class 2, Type V CRISPR and the gRNA exhibits increased binding affinity for the one or more PAM sequences that is at least 1.5-fold, at least 2-fold, at least 4-fold, at least 10-fold, at least 20-fold, at least 30-fold, or at least 40-fold greater compared to the binding affinity of an RNP of any one of the reference proteins of SEQ ID NOS:1-3 and the gRNA of SEQ ID NO: 4 or SEQ ID NO: 5, when assessed in a comparable in vitro assay system.

[0983] Embodiment 89. The gene editing pair of any one of embodiments 77 to 88, wherein the RNP of the Class 2, Type V CRISPR protein and the gRNA exhibits increased editing efficiency that is at least 1.5-fold, at least 2-fold, at least 4-fold, at least 10-fold, at least 20-fold, at least 30-fold, or at least 40-fold greater compared to the editing efficiency of an RNP of any one of the reference proteins of SEQ ID NOS:1-3 and the gRNA of SEQ ID NO: 4 or SEQ ID NO: 5, when assessed in a comparable in vitro assay system.

[0984] Embodiment 90. The gene editing pair of any one of embodiments 77 to 89, wherein the Class 2, Type V CRISPR and the gRNA are able to form RNP having at least about a 5%, at least about a 10%, at least about a 15%, or at least about a 20% higher percentage of cleavage-competent conformation compared to an RNP of any one of the reference proteins of SEQ ID NOS: 1-3 and the gRNA of SEQ ID NO: 4 or SEQ ID NO: 5, when assessed in a comparable in vitro assay system.

[0985] Embodiment 91. The gene editing pair of any one of embodiments 77 to 90, wherein the RNP comprising the Class 2, Type V CRISPR and the gRNA exhibit a cleavage rate for the target nucleic acid in a timed in vitro assay that is at least about 5-fold, at least about 10-fold, or at least about 20-fold higher compared to an RNP of any one of the reference proteins of SEQ ID NOS: 1-3 and the gRNA of SEQ ID NO: 4 or SEQ ID NO: 5, when assessed in a comparable in vitro assay system.

[0986] Embodiment 92. The gene editing pair of any one of embodiments 77 to 91, wherein the RNP comprising the Class 2, Type V CRISPR and the gRNA exhibit higher percent editing of the target nucleic acid in a timed in vitro assay that is at least about 5-fold, at least about 10-fold, at least about 20-fold, or at least about 100-fold higher compared to an RNP of any one of the reference proteins of SEQ ID NOS: 1-3 and the gRNA of SEQ ID NO: 4 or SEQ ID NO:5, when assessed in a comparable in vitro assay system.

[0987] Embodiment 93. A catalytically-dead Class 2, Type V CRISPR protein, comprising a sequence selected from the group consisting of SEQ NOS: 44-62 and 1232-1235, as set forth in Table 7, or a sequence having at least 60%, at least 70%, at least 80%, at least 90%, at least 95%, at least 98%, at least 99% thereto.

[0988] Embodiment 94. A catalytically-dead Class 2, Type V CRISPR protein, comprising a sequence selected from the group consisting of SEQ NOS: 44-62 and 1232-1235, as set forth in Table 7.

[0989] Embodiment 95. The Class 2, Type V CRISPR protein of embodiment 93 or embodiment 94, wherein and RNP of the catalytically-dead Class 2, Type V CRISPR protein and a gRNA of any one of embodiments 25 to 28 retain the ability to bind target nucleic acid.

[0990] Embodiment 96. A nucleic acid comprising a sequence that encodes the gRNA scaffold of any one of embodiments 1 to 24, or the gRNA of any one of embodiments 25 to 28.

[0991] Embodiment 97. A nucleic acid comprising a sequence that encodes the Class 2, Type V CRISPR protein of any one of embodiments 29 to 75.

[0992] Embodiment 98. The nucleic acid of embodiment 97, wherein the sequence that encodes the Class 2, Type V CRISPR protein is codon optimized for expression in a eukaryotic cell.

[0993] Embodiment 99. A vector comprising the gRNA of any one of embodiments 25 to 28, the Class 2, Type V CRISPR protein of any one of embodiments 29 to 75, or the nucleic acid of any one of embodiments 96 to 98.

[0994] Embodiment 100. The vector of embodiment 99, wherein the vector comprises a promoter.

[0995] Embodiment 101. The vector of embodiment 99 or embodiment 100, wherein the vector is selected from the group consisting of a retroviral vector, a lentiviral vector, an adenoviral vector, an adeno-associated viral (AAV) vector, a herpes simplex virus (HSV) vector, a CasX delivery particle (XDP), a plasmid, a minicircle, a nanoplasmid, a DNA vector, and an RNA vector.

[0996] Embodiment 102. The vector of embodiment 101, wherein the vector is an AAV vector.

[0997] Embodiment 103. The vector of embodiment 102, wherein the AAV vector is selected from AAV1, AAV2, AAV3, AAV4, AAV5, AAV6, AAV7, AAV8, AAV9, AAV10, AAV11, AAV12, AAV-Rh74, or AAVRh10.

[0998] Embodiment 104. The vector of embodiment 101, wherein the vector is a retroviral vector.

[0999] Embodiment 105. The vector of embodiment 101, wherein the vector is a XDP comprising one or more components of a gag polyprotein.

[1000] Embodiment 106. The vector of embodiment 105, wherein the one or more components of the gag polyprotein are selected from the group consisting of matrix protein (MA), a nucleocapsid protein (NC), a capsid protein (CA), a p1 peptide, a p6 peptide, a P2A peptide, a P2B peptide, a P10 peptide, a p12 peptide, a PP21/24 peptide, a P12/P3/P8 peptide, a P20 peptide, and a protease cleavage site.

[1001] Embodiment 107. The vector of embodiment 105 or embodiment 106, wherein the Class 2, Type V CRISPR protein and the gRNA are associated together in an RNP.

[1002] Embodiment 108. The vector of any one of embodiments 105 to 107, comprising a glycoprotein tropism factor.

[1003] Embodiment 109. The vector of embodiment 108, wherein the glycoprotein tropism factor has binding affinity for a cell surface marker of a target cell and facilitates entry of the XDP into the target cell.

[1004] Embodiment 110. The vector of any one of embodiments 99 to 109, comprising the donor template.

[1005] Embodiment 111. A host cell comprising the vector of any one of embodiments 99 to 110.

[1006] Embodiment 112. The host cell of embodiment 111, wherein the host cell is selected from the group consisting of Baby Hamster Kidney fibroblast (BHK) cells, human embryonic kidney 293 (HEK293) cells, human embryonic kidney 293T (HEK293T) cells, NSO cells, SP2/0 cells, YO myeloma cells, P3X63 mouse myeloma cells, PER cells, PER.C6 cells, hybridoma cells, NIH3T3 cells, CV-1 (simian) in Origin with SV40 genetic material (COS) cells, HeLa, Chinese hamster ovary (CHO) cells, or yeast cells.

[1007] Embodiment 113. A method of modifying a target nucleic acid in a cell, comprising contacting the target nucleic acid of the cell with: i) the gene editing pair of any one of embodiments 76 to 92; ii) the gene editing pair of any one of embodiments 76 to 92 together with a donor template; iii) one or more nucleic acids encoding the gene editing pair of (i) or (ii); iv) a vector comprising the nucleic acid of (iii); v) an XDP comprising the gene editing pair of (i) or (ii); or vi) combinations of two or more of (i) to (v), wherein the contacting of the target nucleic acid modifies the target nucleic acid.

[1008] Embodiment 114. The method of embodiment 113, comprising contacting the target with a plurality of gene editing pairs comprising a first and a second, or a plurality of gRNAs comprising targeting sequences complementary to different or overlapping regions of the target nucleic acid.

[1009] Embodiment 115. The method of embodiment 113, comprising contacting the target with a plurality of nucleic acids encoding gene editing pairs comprising a first and a second, or a plurality of gRNAs comprising targeting sequences complementary to different or overlapping regions of the target nucleic acid.

[1010] Embodiment 116. The method of embodiment 113, comprising contacting the target with a plurality of XDP comprising gene editing pairs comprising a first and a second, or a plurality of gRNAs comprising targeting sequences complementary to different or overlapping regions of the target nucleic acid.

[1011] Embodiment 117. The method of any one of embodiment 113, wherein the contacting comprises binding the target nucleic acid with the gene editing pair and introducing one or more single-stranded breaks in the target nucleic acid, wherein the modifying comprises introducing a mutation, an insertion, or a deletion in the target nucleic acid.

[1012] Embodiment 118. The method of any one of embodiments 113 to 116 wherein the contacting comprises binding the target nucleic acid and introducing one or more double-stranded breaks in the target nucleic acid, wherein the modifying comprises introducing a mutation, an insertion, or a deletion in the target nucleic acid.

[1013] Embodiment 119. The method of any one of embodiments 113 to 118, comprising contacting the target nucleic acid with a nucleotide sequence of a donor template nucleic acid wherein the donor template comprises a nucleotide sequence having homology to the target nucleic acid.

[1014] Embodiment 120. The method of embodiment 119, wherein the donor template comprises homologous arms on the 5′ and 3′ ends of the donor template.

[1015] Embodiment 121. The method of embodiment 119 or embodiment 120, wherein the donor template is inserted in the target nucleic acid at the break site by homology-directed repair.

[1016] Embodiment 122. The method of embodiment 121, wherein the donor template is inserted in the target nucleic acid at the break site by non-homologous end joining (NHEJ) or micro-homology end joining (MMEJ).

[1017] Embodiment 123. The method of any one of embodiments 113 to 122, wherein the modifying of the cell occurs in vitro.

[1018] Embodiment 124. The method of any one of embodiments 113 to 122, wherein modifying of the cell occurs in vivo.

[1019] Embodiment 125. The method of any one of embodiments 113 to 124, wherein the cell is a eukaryotic cell.

[1020] Embodiment 126. The method of embodiment 125, wherein the eukaryotic cell is selected from the group consisting of a rodent cell, a mouse cell, a rat cell, a primate cell, and a non-human primate cell.

[1021] Embodiment 127. The method of embodiment 125, wherein the eukaryotic cell is a human cell.

[1022] Embodiment 128. The method of any one of embodiments 113 to 127, wherein the cell is selected from the group consisting of an embryonic stem cell, an induced pluripotent stem cell, a germ cell, a fibroblast, an oligodendrocyte, a glial cell, a hematopoietic stem cell, a neuron progenitor cell, a neuron, a muscle cell, a bone cell, a hepatocyte, a pancreatic cell, a retinal cell, a cancer cell, a T-cell, a B-cell, an NK cell, a fetal cardiomyocyte, a myofibroblast, a mesenchymal stem cell, an autotransplanted expanded cardiomyocyte, an adipocyte, a totipotent cell, a pluripotent cell, a blood stem cell, a myoblast, an adult stem cell, a bone marrow cell, a mesenchymal cell, a parenchymal cell, an epithelial cell, an endothelial cell, a mesothelial cell, a fibroblast cell, an osteoblast cell, a chondrocyte cell, an exogenous cell, an endogenous cell, a stem cell, a hematopoietic stem cell, a bone-marrow derived progenitor cell, a myocardial cell, a skeletal cell, a fetal cell, an undifferentiated cell, a multi-potent progenitor cell, a unipotent progenitor cell, a monocyte, a cardiac myoblast, a skeletal myoblast, a macrophage, a capillary endothelial cell, a xenogenic cell, an allogenic cell, an autologous cell, and a post-natal stem cell.

[1023] Embodiment 129. The method of any one of embodiments 124 to 128, wherein the cell is in a subject.

[1024] Embodiment 130. The method of embodiment 129, wherein the modifying occurs in the cells of the subject having a mutation in an allele of a gene wherein the mutation causes a disease or disorder in the subject.

[1025] Embodiment 131. The method of embodiment 130, wherein the modifying changes the mutation to a wild type allele of the gene or results in the expression of a functional gene product.

[1026] Embodiment 132. The method of embodiment 130, wherein the modifying knocks down or knocks out the allele of the gene causing the disease or disorder in the subject.

[1027] Embodiment 133. The method of any one of embodiments 129 to 132, wherein the cell is autologous with respect to the subject.

[1028] Embodiment 134. The method of any one of embodiments 129 to 132, wherein the cell is allogeneic autologous with respect to the subject.

[1029] Embodiment 135. The method of any one of embodiments 113 to 134, wherein the vector is an Adeno-Associated Viral (AAV) vector.

[1030] Embodiment 136. The method of embodiment 135, wherein the AAV is AAV1, AAV2, AAV3, AAV4, AAV5, AAV6, AAV7, AAV8, AAV9, AAV10, AAV-Rh74, or AAVRh10.

[1031] Embodiment 137. The method of embodiment 113, wherein the vector is a lentiviral vector.

[1032] Embodiment 138. The method of any one of embodiments 113 to 137, wherein the vector is administered to a subject in need using a therapeutically effective dose.

[1033] Embodiment 139. The method of embodiment 138, wherein the subject is selected from the group consisting of mouse, rat, pig, and non-human primate.

[1034] Embodiment 140. The method of embodiment 138, wherein the subject is a human.

[1035] Embodiment 141. The method of any one of embodiments 138 to 140, wherein the vector is administered to the subject at a dose of at least about 1×10⁵ vector genomes/kg (vg/kg), at least about 1×10⁶ vg/kg, at least about 1×10⁷ vg/kg, at least about 1×10⁸ vg/kg, at least about 1×10⁹ vg/kg, at least about 1×10¹⁰ vg/kg, at least about 1×10¹¹ vg/kg, at least about 1×10¹² vg/kg, at least about 1×10¹³ vg/kg, at least about 1×10¹⁴ vg/kg, at least about 1×10¹⁵ vg/kg, or at least about 1×10¹⁶ vg/kg.

[1036] Embodiment 142. The method of any one of embodiments 138 to 140, wherein the vector is administered to the subject at a dose of at least about 1×10⁵ vg/kg to about 1×10¹⁶ vg/kg, at least about 1×10⁶ vg/kg to about 1×10¹⁵ vg/kg, or at least about 1×10⁷ vg/kg to about 1×10¹⁴ vg/kg.

[1037] Embodiment 143. The method of embodiment 113, wherein the vector is an XDP.

[1038] Embodiment 144. The method of embodiment 143, wherein the XDP is administered to the subject in need using a therapeutically effective dose.

[1039] Embodiment 145. The method of embodiment 144, wherein the XDP is administered to the subject at a dose of at least about 1×10⁵ particles/kg, at least about 1×10⁶ particles/kg, at least about 1×10⁷ particles/kg at least about 1×10⁸ particles/kg, at least about 1×10⁹ particles/kg, at least about 1×10¹⁰ particles/kg, at least about 1×10¹¹ particles/kg, at least about 1×10¹² particles/kg, at least about 1×10¹³ particles/kg, at least about 1×10¹⁴ particles/kg, at least about 1×10¹⁵ particles/kg, at least about 1×10¹⁶ particles/kg.

[1040] Embodiment 146. The method of embodiment 143, wherein the XDP is administered to the subject at a dose of at least about 1×10⁵ particles/kg to about 1×10¹⁶ particles/kg, or at least about 1×10⁶ particles/kg to about 1×10¹⁵ particles/kg, or at least about 1×10⁷ particles/kg to about 1×10¹⁴ particles/kg.

[1041] Embodiment 147. The method of any one of embodiments 138 to 146, wherein the vector is administered by a route of administration selected from the group consisting of intraparenchymal, intravenous, intra-arterial, intracerebroventricular, intracisternal, intrathecal, intracranial, and intraperitoneal routes wherein the administering method is injection, transfusion, or implantation.

[1042] Embodiment 148. The method of any one of embodiments 141 to 147, wherein the vector is administered to the subject according to a treatment regimen comprising one or more consecutive doses using a therapeutically effective dose of the vector.

[1043] Embodiment 149. The method of embodiment 148, wherein the therapeutically effective dose is administered to the subject as two or more doses over a period of at least two weeks, or at least one month, or at least two months, or at least three months, or at least four months, or at least five months, or at least six months, or once a year, or every 2 or 3 years.

[1044] Embodiment 150. A cell comprising a target nucleic acid modified by the gene editing pair of any one of embodiments 76 to 92.

[1045] Embodiment 151. A cell edited by the method of any one of embodiments 113 to 149.

[1046] Embodiment 152. The cell of embodiment 150 or 151, wherein the cell is a prokaryotic cell.

[1047] Embodiment 153. The cell of embodiment 150 or 151, wherein the cell is a eukaryotic cell.

[1048] Embodiment 154. The cell of embodiment 153, wherein the eukaryotic cell is selected from the group consisting of a rodent cell, a mouse cell, a rat cell, a primate cell, and a non-human primate cell.

[1049] Embodiment 155. The cell of embodiment 153, wherein the eukaryotic cell is a human cell.

[1050] Embodiment 156. A composition, comprising the Class 2, Type V CRISPR protein of any one of embodiments 29 to 75.

[1051] Embodiment 157. The composition of embodiment 156, comprising the gRNA of any one of embodiments 25 to 28.

[1052] Embodiment 158. The composition of embodiment 157, wherein the protein and the gRNA are associated together in a ribonuclear protein complex (RNP).

[1053] Embodiment 159. The composition of any one of embodiments 156 to 158, comprising a donor template nucleic acid wherein the donor template comprises a nucleotide sequence having homology to a target nucleic acid.

[1054] Embodiment 160. The composition of any one of embodiments 156 to 159, comprising a buffer, a nuclease inhibitor, a protease inhibitor, a liposome, a therapeutic agent, a label, a label visualization reagent, or any combination of the foregoing.

[1055] Embodiment 161. A composition, comprising a gRNA scaffold of any one of embodiments 1 to 24, or a gRNA of any one of embodiments 25 to 28.

[1056] Embodiment 162. The composition of embodiment 161, comprising the Class 2, Type V CRISPR protein of any one of embodiments 29 to 75.

[1057] Embodiment 163. The composition of embodiment 162, wherein the Class 2, Type V CRISPR protein and the gRNA are associated together in a ribonuclear protein complex (RNP).

[1058] Embodiment 164. The composition of any one of embodiments 161 to 163, comprising a donor template nucleic acid wherein the donor template comprises a nucleotide sequence having homology to a target nucleic acid.

[1059] Embodiment 165. The composition of any one of embodiments 161 to 164, comprising a buffer, a nuclease inhibitor, a protease inhibitor, a liposome, a therapeutic agent, a label, a label visualization reagent, or any combination of the foregoing.

[1060] Embodiment 166. A composition, comprising the gene editing pair of any one of embodiments 76 to 92.

[1061] Embodiment 167. The composition of embodiment 166, comprising a donor template nucleic acid wherein the donor template comprises a nucleotide sequence having homology to a target nucleic acid.

[1062] Embodiment 168. The composition of embodiment 166 or embodiment 167, comprising a buffer, a nuclease inhibitor, a protease inhibitor, a liposome, a therapeutic agent, a label, a label visualization reagent, or any combination of the foregoing.

[1063] Embodiment 169. A kit, comprising the Class 2, Type V CRISPR protein of any one of embodiments 29 to 75 and a container.

[1064] Embodiment 170. The kit of embodiment 169, comprising a gRNA scaffold of any one of embodiments 1 to 24, or a gRNA of any one of embodiments 25 to 28.

[1065] Embodiment 171. The kit of embodiment 169 or embodiment 170, comprising a donor template nucleic acid wherein the donor template comprises a nucleotide sequence having homology to a target nucleic acid sequence of a target nucleic acid.

[1066] Embodiment 172. The kit of any one of embodiments 169 to 171, comprising a buffer, a nuclease inhibitor, a protease inhibitor, a liposome, a therapeutic agent, a label, a label visualization reagent, or any combination of the foregoing.

[1067] Embodiment 173. A kit, comprising a gRNA scaffold of any one of embodiments 1 to 24, or a gRNA of any one of embodiments 25 to 28.

[1068] Embodiment 174. The kit of embodiment 173, comprising the Class 2, Type V CRISPR protein of any one of embodiments 29 to 75.

[1069] Embodiment 175. The kit of embodiment 173 or embodiment 174, comprising a donor template nucleic acid wherein the donor template comprises a nucleotide sequence having homology to a target nucleic acid sequence of a target nucleic acid.

[1070] Embodiment 176. The kit of any one of embodiments 173 to 175, comprising a buffer, a nuclease inhibitor, a protease inhibitor, a liposome, a therapeutic agent, a label, a label visualization reagent, or any combination of the foregoing.

[1071] Embodiment 177. A kit, comprising the gene editing pair of any one of embodiments 76 to 92.

[1072] Embodiment 178. The kit of embodiment 177, comprising a donor template nucleic acid wherein the donor template comprises a nucleotide sequence having homology to a target nucleic acid.

[1073] Embodiment 179. The kit of embodiment 177 or embodiment 178, comprising a buffer, a nuclease inhibitor, a protease inhibitor, a liposome, a therapeutic agent, a label, a label visualization reagent, or any combination of the foregoing.

[1074] Embodiment 180. An engineered Class 2, Type V CRISPR protein comprising any one of the sequences listed in Table 3.

[1075] Embodiment 181. A gRNA comprising any one of the gRNA scaffold variant sequences listed in Table 2.

[1076] Embodiment 182. The gRNA of embodiment 181, wherein one or more uracils (U) of the gRNA scaffold variants of the Table 2 sequences are replaced with thymines (T).

[1077] Embodiment 183. The gRNA of embodiment 182, comprising a targeting sequence of at least 10 to 30 nucleotides complementary to a target nucleic acid.

[1078] Embodiment 184. The gRNA of embodiment 183, wherein the targeting sequence has 20 nucleotides.

[1079] Embodiment 185. The gRNA of embodiment 183, wherein the targeting sequence has 19 nucleotides.

[1080] Embodiment 186. The gRNA of embodiment 183, wherein the targeting sequence has 18 nucleotides.

[1081] Embodiment 187. The gRNA of embodiment 183, wherein the targeting sequence has 17 nucleotides.

[1082] Embodiment 188. The gRNA of embodiment 183, wherein the targeting sequence has 16 nucleotides.

[1083] Embodiment 189. The gRNA of embodiment 183, wherein the targeting sequence has 15 nucleotides.

[1084] Embodiment 190. A method of treating a disease in a subject in need thereof, comprising administering to the subject a therapeutically effective amount of a composition comprising: (a) an engineered class 2, type V CRISPR protein of any one of embodiments 29 to 75 and 180 and (b) a gRNA of any one of embodiments 25 to 28 and 181 to 189.

[1085] Embodiment 191. A composition comprising: (a) an engineered class 2, type V CRISPR protein of any one of embodiments 29 to 75 and 180 and (b) a gRNA of any one of embodiments 25 to 28 and 181 to 189, for use as a medicament for the treatment of a subject having a disease.

[1086] The following Examples are merely illustrative and are not meant to limit any aspects of the present disclosure in any way.

### EXAMPLES

### Example 1: Generating CasX Variant Constructs

[1087] In order to generate the CasX 488 construct (sequences in Table 9), the codon-optimized CasX 119 construct (based on the CasX Stx2 construct, encoding Planctomycetes CasX SEQ ID NO: 2, with amino acid substitutions and deletions) was cloned into a destination plasmid (pStX) using standard cloning methods. In order to generate the CasX 491 construct (sequences in Table 9), the codon-optimized CasX 484 construct (based on the CasX Stx2 construct, encoding Planctomycetes CasX SEQ ID NO: 2, with substitutions and deletions of certain amino acids, with fused NLS, and linked guide and non-targeting sequences) was cloned into a destination plasmid (pStX) using standard cloning methods. Construct CasX 1 (CasX SEQ ID NO: 1) was cloned into a destination vector using standard cloning methods. To build CasX 488, the CasX 119 construct DNA was PCR amplified in two reactions using Q5 DNA polymerase according to the manufacturer's protocol, using universal appropriate primers. To build CasX 491, the codon optimized CasX 484 construct DNA was PCR amplified in two reactions using Q5 DNA polymerase according to the manufacturer's protocol, using appropriate primers. The CasX 1 construct was PCR amplified in two reactions using Q5 DNA polymerase according to the manufacturer's protocol, universal appropriate primers. Each of the PCR products were purified by gel extraction from a 1% agarose gel (Gold Bio Cat #A-201-500) using Zymoclean™ Gel DNA Recovery Kit according to the manufacturer's protocol. The corresponding fragments were then pieced together using Gibson@ assembly (New England BioLabs Cat #E2621S) following the manufacturer's protocol. Assembled products in pStxl were transformed into chemically-competent Turbo Competent E. coli bacterial cells, plated on LB-Agar plates containing kanamycin. Individual colonies were picked and miniprepped using Qiagen spin Miniprep Kit following the manufacturer's protocol. The resultant plasmids were sequenced using Sanger sequencing to ensure correct assembly. The correct clones were then subcloned into the mammalian expression vector pStx34 using restriction enzyme cloning. The pStx34 backbone and the CasX 488 and 491 clones in pStxl were digested with XbaI and BamHI respectively. The digested backbone and respective insert fragments were purified by gel extraction from a 1% agarose gel (Gold Bio Cat #A-201-500) using Zymoclean™ Gel DNA Recovery Kit according to the manufacturer's protocol. The clean backbone and insert were then ligated together using T4 Ligase (New England Biolabs Cat #M0202L) according to the manufacturer's protocol. The ligated products were transformed into chemically-competent Turbo Competent E. coli bacterial cells, plated on LB-Agar plates containing carbenicillin. Individual colonies were picked and miniprepped using Qiagen spin Miniprep Kit following the manufacturer's protocol. The resultant plasmids were sequenced using Sanger sequencing to ensure correct assembly.

[1088] To build CasX 515 (sequences in Table 9), the CasX 491 construct DNA was PCR amplified in two reactions using Q5 DNA polymerase according to the manufacturer's protocol, using appropriate primers. To build CasX 527 (sequences in Table 9), the CasX 491 construct DNA was PCR amplified in two reactions using Q5 DNA polymerase according to the manufacturer's protocol, using appropriate primers. The PCR products were purified by gel extraction from a 1% agarose gel using Zymoclean™ Gel DNA Recovery Kit according to the manufacturer's protocol. The pStX backbone was digested using XbaI and SpeI in order to remove the 2931 base pair fragment of DNA between the two sites in plasmid pStx56. The digested backbone fragment was purified by gel extraction from a 1% agarose gel using Zymoclean™ Gel DNA Recovery Kit according to the manufacturer's protocol. The insert and backbone fragments were then pieced together using Gibson@ assembly (New England BioLabs Cat #E2621S) following the manufacturer's protocol. Assembled products in the pStx56 were transformed into chemically-competent Turbo Competent E. coli bacterial cells, plated on LB-Agar plates containing kanamycin. Individual colonies were picked and miniprepped using Qiagen spin Miniprep Kit following the manufacturer's protocol. The resultant plasmids were sequenced using Sanger sequencing to ensure correct assembly. pStX34 includes an EF-1a promoter for the protein as well as a selection marker for both puromycin and carbenicillin. pStX56 includes an EF-1a promoter for the protein as well as a selection marker for both puromycin and kanamycin Sequences encoding the targeting sequences that target the gene of interest were designed based on CasX PAM locations. Targeting sequence DNA was ordered as single-stranded DNA (ssDNA) oligos (Integrated DNA Technologies) consisting of the targeting sequence and the reverse complement of this sequence. These two oligos were annealed together and cloned into pStX individually or in bulk by Golden Gate assembly using T4 DNA Ligase and an appropriate restriction enzyme for the plasmid. Golden Gate products were transformed into chemically or electro-competent cells such as NEB Turbo competent E. coli (NEB Cat #C2984I), plated on LB-Agar plates containing the appropriate antibiotic. Individual colonies were picked and miniprepped using Qiaprep® spin Miniprep Kit and following the manufacturer's protocol. The resultant plasmids were sequenced using Sanger sequencing to ensure correct ligation.

[1089] To build CasX 535-537 (sequences in Table 9), the CasX 515 construct DNA was PCR amplified in two reactions for each construct using Q5 DNA polymerase according to the manufacturer's protocol. For CasX 535, appropriate primers were used for the amplification. For CasX 536 appropriate primers were used. For CasX 537, appropriate primers were used. The PCR products were purified by gel extraction from a 1% agarose gel using Zymoclean™ Gel DNA Recovery Kit according to the manufacturer's protocol. The pStX backbone was digested using XbaI and SpeI in order to remove the 2931 base pair fragment of DNA between the two sites in plasmid pStx56. The digested backbone fragment was purified by gel extraction from a 1% agarose gel using Zymoclean™ Gel DNA Recovery Kit according to the manufacturer's protocol. The insert and backbone fragments were then pieced together using Gibson® assembly following the manufacturer's protocol. Assembled products in pStx56 were transformed into chemically-competent Turbo Competent E. coli bacterial cells, plated on LB-Agar plates containing kanamycin. Individual colonies were picked and miniprepped using Qiagen spin Miniprep Kit following the manufacturer's protocol. The resultant plasmids were sequenced using Sanger sequencing to ensure correct assembly. pStX34 includes an EF-1a promoter for the protein as well as a selection marker for both puromycin and carbenicillin. pStX56 includes an EF-1a promoter for the protein as well as a selection marker for both puromycin and kanamycin. Sequences encoding the targeting sequences that target the gene of interest were designed based on CasX PAM locations. Targeting sequence DNA was ordered as single-stranded DNA (ssDNA) oligos (Integrated DNA Technologies) consisting of the targeting sequence and the reverse complement of this sequence. These two oligos were annealed together and cloned into pStX individually or in bulk by Golden Gate assembly using T4 DNA Ligase and an appropriate restriction enzyme for the plasmid. Golden Gate products were transformed into chemically or electro-competent cells such as NEB Turbo competent E. coli, plated on LB-Agar plates containing the appropriate antibiotic. Individual colonies were picked and miniprepped using Qiaprep® spin Miniprep Kit and following the manufacturer's protocol. The resultant plasmids were sequenced using Sanger sequencing to ensure correct ligation.

[1090] All subsequent CasX variants, such as CasX 544 and CasX 660-664, 668, 670, 672, 676, and 677 were cloned using the same methodology as described above using Gibson® assembly with mutation-specific internal primers and universal forward and reverse primers (the differences between them were the mutation specific primers designed as well as which CasX base construct was used). SaCas9 and SpyCas9 control plasmids were prepared similarly to pStX plasmids described above, with the protein and guide regions of pStX exchanged for the respective protein and guide. Targeting sequences for SaCas9 and SpyCas9 were either obtained from the literature or were rationally designed according to established methods.

[1091] The expression and recovery of the CasX constructs was performed using standard methodologies and are summarized as follows: Purification:

[1092] Frozen samples were thawed overnight at 4° C. with magnetic stirring. The viscosity of the resulting lysate was reduced by sonication and lysis was completed by homogenization in two passes at 20k PSI using a NanoDeBEE (BEE International). Lysate was clarified by centrifugation at 50,000×g, 4° C., for 30 minutes and the supernatant was collected. The clarified supernatant was applied to a Heparin 6 Fast Flow column (Cytiva) using an AKTA Pure FPLC (Cytiva). The column was washed with 5 CV of Heparin Buffer A (50 mM HEPES-NaOH, 250 mM NaCl, 5 mM MgCl2, 0.5 mM TCEP, 10% glycerol, pH 8), then with 3 CV of Heparin Buffer B (Buffer A with the NaCl concentration adjusted to 500 mM). Protein was eluted with 1.75 CV of Heparin Buffer C (Buffer A with the NaCl concentration adjusted to 1 M). The eluate was applied to a StrepTactin HP column (Cytiva) using the FPLC. The column was washed with 10 CV of Strep Buffer (50 mM HEPES-NaOH, 500 mM NaCl, 5 mM MgCl2, 0.5 mM TCEP, 10% glycerol, pH 8). Protein was eluted from the column using 1.65 CV of Strep Buffer with 2.5 mM Desthiobiotin added. CasX-containing fractions were pooled, concentrated at 4° C. using a 50 kDa cut-off spin concentrator (Amicon), and purified by size exclusion chromatography on a Superdex 200 pg column (Cytiva). The column was equilibrated with SEC Buffer (25 mM sodium phosphate, 300 mM NaCl, 1 mM TCEP, 10% glycerol, pH 7.25) and operated by FPLC. CasX-containing fractions that eluted at the appropriate molecular weight were pooled, concentrated at 4° C. using a 50 kDa cut-off spin concentrator, aliquoted, and snap-frozen in liquid nitrogen before being stored at −80° C.

[1093] CasX variant 488: The average yield was 2.7 mg of purified CasX protein per liter of culture at 98.8% purity, as evaluated by colloidal Coomassie staining.

[1094] CasX Variant 491: The average yield was 12.4 mg of purified CasX protein per liter of culture at 99.4% purity, as evaluated by colloidal Coomassie staining.

[1095] CasX variant 515: The average yield was 7.8 mg of purified CasX protein per liter of culture at 90% purity, as evaluated by colloidal Coomassie staining.

[1096] CasX variant 526: The average yield was 13.79 mg per liter of culture, at 93% purity. Purity was evaluated by colloidal Coomassie staining.

[1097] CasX variant 668: The average yield was 3.32 mg per liter of culture, at 93% purity. Purity was evaluated by colloidal Coomassie staining.

[1098] CasX variant 672: The average yield was 6.50 mg per liter of culture, at 88% purity. Purity was evaluated by colloidal Coomassie staining.

[1099] CasX variant 676: The average yield was 5.05 mg per liter of culture, at 92% purity. Purity was evaluated by colloidal Coomassie staining.

[1100] CasX variant 677: The average yield was 2.93 mg per liter of culture, at 81% purity. Purity was evaluated by colloidal Coomassie staining.

TABLE 9
CasX variant DNA and amino acid sequences

| Construct | DNA SEQ ID NO | Amino Acid SEQ ID NO |
|---|---|---|
| CasX 488 | 1027 | 1045 |
| CasX 491 | 1028 | 1046 |
| CasX 515 | 1029 | 1047 |
| CasX 527 | 1030 | 1048 |
| CasX 535 | 1031 | 1049 |
| CasX 536 | 1032 | 1050 |
| CasX 537 | 1033 | 1051 |
| CasX 583 | 1034 | 1052 |
| CasX 660 | 1035 | 1053 |
| CasX 661 | 1036 | 1054 |
| CasX 662 | 1037 | 1055 |
| CasX 663 | 1038 | 1056 |
| CasX 664 | 1039 | 1057 |
| CasX 668 | 1040 | 1058 |
| CasX 670 | 1041 | 1059 |
| CasX 672 | 1042 | 1060 |
| CasX 676 | 1043 | 1061 |
| CasX 677 | 1044 | 1062 |

### Example 2: Generation of RNA Guides

[1101] For the generation of RNA single guides and targeting sequences, templates for in vitro transcription were generated by performing PCR with Q5 polymerase, template primers for each backbone, and amplification primers with the T7 promoter and the targeting sequence. The DNA primer sequences for the T7 promoter, guide and targeting sequence for guides and targeting sequences are presented in Table 10, below. The sg1, sg2, sg32, sg64, sg174, and sg235 guides correspond to SEQ ID NOS: 4, 5, 2104, 2106, 2238, and 2292, respectively, with the exception that sg2, sg32, and sg64 were modified with an additional 5′ G to increase transcription efficiency (compare sequences in Table 10 to Table 2). The 7.37 targeting sequence targets beta2-microglobulin (B2M). Following PCR amplification, templates were cleaned and isolated by phenol-chloroform-isoamyl alcohol extraction followed by ethanol precipitation.

[1102] In vitro transcriptions were carried out in buffer containing 50 mM Tris pH 8.0, 30 mM MgCl2, 0.01% Triton™ X-100, 2 mM spermidine, 20 mM DTT, 5 mM NTPs, 0.5 μM template, and 100 μg/mL T7 RNA polymerase. Reactions were incubated at 37° C. overnight. 20 units of DNase I (Promega #M6101)) were added per 1 mL of transcription volume and incubated for one hour. RNA products were purified via denaturing PAGE, ethanol precipitated, and resuspended in 1X phosphate buffered saline. To fold the sgRNAs, samples were heated to 70° C. for 5 min and then cooled to room temperature. The reactions were supplemented to 1 mM final MgCl₂ concentration, heated to 50° C. for 5 min and then cooled to room temperature. Final RNA guide products were stored at −80° C.

TABLE 10
DNA primer sequences for the T7 promoter,
guide and targeting sequence for guides

| | | SEQ |
|---|---|---|
| Primer | | ID NO |
| T7 promoter primer | GAAATTAATACGACTCACTATA (used for all) | 169 |
| | RNA product | |
| sg2 backbone fwd | GGUACUGGCGCUUUUAUCUCAUUACUUUGAGAGCCAUCACC | 1063 |
| | AGCGACUAUGUCGUAUGGGUAAAGCGCUUAUUUAUCGGAGA | |
| sg2 backbone rev | GAAAUCCGAUAAAUAAGAAGCAUCAAAGGGCCGAGAUGUCU | |
| sg2.7.37 spacer | CGCUCCG | |
| primer | | |
| sg32 backbone fwd | GGUACUGGCGCUUUUAUCUCAUUACUUUGAGAGCCAUCACC | 1064 |
| sg32 backbone rev | AGCGACUAUGUCGUAUGGGUAAAGCGCCCUCUUCGGAGGGA | |
| sg32.7.37 spacer | AGCAUCAAAGGGCCGAGAUGUCUCG | |
| primer | | |
| sg64 backbone fwd | GGUACUGGCGCCUUUAUCUCAUUACUUUGAGAGCCAUCACC | 1065 |
| sg64 backbone rev | AGCGACUAUGUCGUAUGGGUAAAGCGCUUACGGACUUCGGU | |
| sg64.7.37 spacer | CCGUAAGAAGCAUCAAAGGGCCGAGAUGUCUCGCUCCG | |
| primer | | |
| sg174 backbone fwd | ACUGGCGCUUUUAUCUgAUUACUUUGAGAGCCAUCACCAGC | 1066 |
| sg174 backbone rev | GACUAUGUCGUAgUGGGUAAAGCUCCCUCUUCGGAGGGAGC | |
| sg174.7.37 spacer | AUCAAAGGGCCGAGAUGUCUCGCUCCG | |
| primer | | |
| sg235 backbone fwd | ACUGGCGCUUCUAUCUGAUUACUCUGAGCGCCAUCACCAGC | 1067 |
| sg235 backbone rev | GACUAUGUCGUAGUGGGUAAAGCCGCUUACGGACUUCGGUC | |
| sg235.7.37 spacer | CGUAAGAGGCAUCAGAG | |
| primer | | |

### Example 3: Assessing Binding Affinity to the Guide RNA

[1103] Purified wild-type and improved CasX will be incubated with synthetic single-guide RNA containing a 3′ Cy7.5 moiety in low-salt buffer containing magnesium chloride as well as heparin to prevent non-specific binding and aggregation. The sgRNA will be maintained at a concentration of 10 pM, while the protein will be titrated from 1 pM to 100 pM in separate binding reactions. After allowing the reaction to come to equilibrium, the samples will be run through a vacuum manifold filter-binding assay with a nitrocellulose membrane and a positively charged nylon membrane, which bind protein and nucleic acid, respectively. The membranes will be imaged to identify guide RNA, and the fraction of bound vs unbound RNA will be determined by the amount of fluorescence on the nitrocellulose vs nylon membrane for each protein concentration to calculate the dissociation constant of the protein-sgRNA complex. The experiment will also be carried out with improved variants of the sgRNA to determine if these mutations also affect the affinity of the guide for the wild-type and mutant proteins. We will also perform electromobility shift assays to qualitatively compare to the filter-binding assay and confirm that soluble binding, rather than aggregation, is the primary contributor to protein-RNA association.

### Example 4: Assessing Binding Affinity to the Target DNA

[1104] Purified wild-type and improved CasX will be complexed with single-guide RNA bearing a targeting sequence complementary to the target nucleic acid. The RNP complex will be incubated with double-stranded target DNA containing a PAM and the appropriate target nucleic acid sequence with a 5′ Cy7.5 label on the target strand in low-salt buffer containing magnesium chloride as well as heparin to prevent non-specific binding and aggregation. The target DNA will be maintained at a concentration of 1 nM, while the RNP will be titrated from 1 pM to 100 pM in separate binding reactions. After allowing the reaction to come to equilibrium, the samples will be run on a native 5% polyacrylamide gel to separate bound and unbound target DNA. The gel will be imaged to identify mobility shifts of the target DNA, and the fraction of bound vs unbound DNA will be calculated for each protein concentration to determine the dissociation constant of the RNP-target DNA ternary complex.

### Example 5: Assessing Differential PAM Recognition In Vitro

### 1. Comparison of Reference and CasX Variants

[1105] In vitro cleavage assays were performed using CasX2, CasX119, and CasX438 complexed with sg174.7.37, essentially as describe in Example 8. Fluorescently labeled dsDNA targets with a 7.37 spacer and either a TTC, CTC, GTC, or ATC PAM were used (sequences are in Table 11). Time points were taken at 0.25, 0.5, 1, 2, 5, 10, 30, and 60 minutes. Gels were imaged with an Cytiva Typhoon and quantified using the IQTL 8.2 software. Apparent first-order rate constants for non-target strand cleavage (k_{cleave}) were determined for each CasX:sgRNA complex on each target. Rate constants for targets with non-TTC PAM were compared to the TTC PAM target to determine whether the relative preference for each PAM was altered in a given protein variant.

[1106] For all variants, the TTC target supported the highest cleavage rate, followed by the ATC, then the CTC, and finally the GTC target (FIGS. 10A-D, Table 12). For each combination of CasX variant and NTC PAM, the cleavage rate k_{cleave} is shown. For all non-NTC PAMs, the relative cleavage rate as compared to the TTC rate for that variant is shown in parentheses. All non-TTC PAMs exhibited substantially decreased cleavage rates (>10-fold for all). The ratio between the cleavage rate of a given non-TTC PAM and the TTC PAM for a specific variant remained generally consistent across all variants. The CTC target supported cleavage 3.5-4.3% as fast as the TTC target; the GTC target supported cleavage 1.0-1.4% as fast; and the ATC target supported cleavage 6.5-8.3% as fast. The exception is for 491, where the kinetics of cleavage at TTC PAMs are too fast to allow accurate measurement, which artificially decreases the apparent difference between TTC and non-TTC PAMs. Comparing the relative rates of 491 on GTC, CTC, and ATC PAMs, which fall within the measurable range, results in ratios comparable to those for other variants when comparing across non-TTC PAMs, consistent with the rates increasing in tandem. Overall, differences between the variants are not substantial enough to suggest that the relative preference for the various NTC PAMs have been altered. However, the higher basal cleavage rates of the variants allow targets with ATC or CTC PAMs to be cleaved nearly completely within 10 minutes, and the apparent kcieaves are comparable to or greater than the kcieave of CasX2 on a TTC PAM (Table 12). This increased cleavage rate may cross the threshold necessary for effective genome editing in a human cell, explaining the apparent increase in PAM flexibility for these variants.

[1107] Table 11: Sequences of DNA substrates used in in vitro PAM cleavage assay

TABLE 11
Sequences of DNA substrates used in
in vitro PAM cleavage assay

| | | SEQ |
|---|---|---|
| | | ID |
| Guide* | DNA Sequence | NO |
| 7.37 TTC PAM | AGCGCGAGCACAGCTAAGGCCACGGAGCGAG | 1068 |
| TS | ACATCTCGGCCCGAATGCTGTCAGCTTCA | |
| 7.37 TTC PAM | TGAAGCTGACAGCATTCGGGCCGAGATGTCT | 1069 |
| NTS | CGCTCCGTGGCCTTAGCTGTGCTCGCGCT | |
| 7.37 CTC PAM | AGCGCGAGCACAGCTAAGGCCACGGAGCGAG | 1070 |
| TS | ACATCTCGGCCCGAGTGCTGTCAGCTTCA | |
| 7.37 CTC PAM | TGAAGCTGACAGCACTCGGGCCGAGATGTCT | 1071 |
| NTS | CGCTCCGTGGCCTTAGCTGTGCTCGCGCT | |
| 7.37 GTC PAM | AGCGCGAGCACAGCTAAGGCCACGGAGCGAG | 1072 |
| TS | ACATCTCGGCCCGACTGCTGTCAGCTTCA | |
| 7.37 GTC PAM | TGAAGCTGACAGCAGTCGGGCCGAGATGTCT | 1073 |
| NTS | CGCTCCGTGGCCTTAGCTGTGCTCGCGCT | |
| 7.37 ATC PAM | AGCGCGAGCACAGCTAAGGCCACGGAGCGAG | 1074 |
| TS | ACATCTCGGCCCGATTGCTGTCAGCTTCA | |
| 7.37 ATC PAM | TGAAGCTGACAGCAATCGGGCCGAGATGTCT | 1075 |
| NTS | CGCTCCGTGGCCTTAGCTGTGCTCGCGCT | |

*The PAM sequences for each are bolded.
TS—target strand.
NTS—Non-target strand.

TABLE 12
Apparent cleavage rates of CasX variants against NTC PAMs

| Variant | TTC | | CTC | | GTC | | ATC | |
|---|---|---|---|---|---|---|---|---|
| 2 | 0.267 | min⁻¹ | 9.29E−3 | min⁻¹ | 3.75E−3 | min⁻¹ | 1.87E−2 | min⁻¹ |
| | | | (0.035) | | (0.014) | | (0.070) | |
| 119 | 8.33 | min⁻¹ | 0.303 | min⁻¹ | 8.64E−2 | min⁻¹ | 0.540 | min⁻¹ |
| | | | (0.036) | | (0.010) | | (0.065) | |
| 438 | 4.94 | min⁻¹ | 0.212 | min⁻¹ | 1.31E−2 | min⁻¹ | 0.408 | min⁻¹ |
| | | | (0.043) | | (0.013) | | (0.083) | |
| 491 | 16.42 | min⁻¹ | 8.605 | min⁻¹ | 2.447 | min⁻¹ | 11.33 | min⁻¹ |

| | | |
|---|---|---|
| (0.524) | (0.149) | (0.690) |

2. Comparison of PAM recognition using single CasX variant

[1108] Materials and Methods: Fluorescently labeled dsDNA targets with a 7.37 spacer and either a TTC, CTC, GTC, ATC, TTT, CTT, GTT, or ATT PAM were used (sequences are in Table 13). Oligos were ordered with a 5′ amino modification and labeled with a Cy7.5 NHS ester for target strand oligos and a Cy5.5 NHS ester for non-target strand oligos. dsDNA targets were formed by mixing the oligos in a 1:1 ratio in 1x cleavage buffer (20 mM Tris HCl pH 7.5, 150 mM NaCl, 1 mM TCEP, 5% glycerol, 10 mM MgCl2), heating to 950 C for 10 minutes, and allowing the solution to cool to room temperature.

[1109] CasX variant 491 was complexed with sg174.7.37. The guide was diluted in 1X cleavage buffer to a final concentration of 1.5 μM, and then protein was added to a final concentration of 1 μM. The RNP was incubated at 37° C. for 10 minutes and then put on ice.

[1110] Cleavage assays were carried out by diluting RNP in cleavage buffer to a final concentration of 200 nM and adding dsDNA target to a final concentration of 10 nM. Time points were taken at 0.25, 0.5, 1, 2, 5, and 10 minutes and quenched by adding to an equal volume of 95% formamide and 20 mM EDTA. Cleavage products were resolved by running on a 10% urea-PAGE gel. Gels were imaged with an Amersham Typhoon and quantified using the IQTL 8.2 software. Apparent first-order rate constants for non-target strand cleavage (k_{cleave}) were determined for each target using GraphPad Prism.

### Results:

[1111] The relative cleavage rate of the 491.174 RNP on various PAMs was investigated. In addition to aiding in the prediction of cleavage efficiencies of targets and potential off-targets in cells, these data will also allow us to adjust the cleavage rate of synthetic targets. In the case of self-limiting AAV vectors, where new protospacers can be added within the vector to allow for self-targeting, we reasoned that the rate of episome cleavage could be adjusted up or down by changing the PAM.

[1112] We tested the cleavage rate of the RNP against various dsDNA substrates that were identical in sequence aside from the PAM. This experimental setup should allow for the isolation of the effects of the PAM itself, rather than convoluting PAM recognition with effects resulting from spacer sequence and genomic context. All NTC and NTT PAMs were tested. As expected, the RNP cleaved the target with the TTC PAM most quickly, converting essentially all of it to product by the first time point (FIG. 11A). CTC was cleaved roughly half as quickly, though the rapid cleavage of TTC makes determining an accurate k_{cleave} difficult under these assay conditions, which are optimized to capture a broader array of cleavage rates (FIG. 11A, Table 14). The GTC target was cleaved most slowly of the NTC PAMs, with a cleavage rate roughly six-fold slower than the TTC target. All NTT PAMs were cleaved more slowly than all NTC PAMs, with TTT cut most efficiently, followed by GTT (FIG. 11B, Table 14). The relative efficiency of GTT cleavage among all NTT PAMs, compared to the low rate of GTC cleavage compared to all NTC PAMs, demonstrates that recognition of individual PAM nucleotides is context-dependent, with nucleotide identity at one position in the PAM affecting sequence preference at the other positions.

[1113] The PAM sequences tested here yield cleavage rates spanning three orders of magnitude while still maintaining cleavage activity at the same spacer sequence. These data demonstrate that cleavage rates at a given synthetic target can be readily modified by changing the associated PAM, allowing for adjustment of self-cleavage activity to allow for efficient targeting of the genomic target prior to cleavage and elimination of the AAV episome.

TABLE 13
Sequences of DNA substrates
used in in vitro PAM cleavage assay*

| PAM & | | SEQ |
|---|---|---|
| Strand | Spacer and PAM Sequence | ID NO |
| 7.37 TTC | AGCGCGAGCACAGCTAAGGCCACGGAGCGA | 1068 |
| PAM TS | GACATCTCGGCCCGAATGCTGTCAGCTTCA | |
| 7.37 TTC | TGAAGCTGACAGCATTCGGGCCGAGATGTC | 1069 |
| PAM NTS | TCGCTCCGTGGCCTTAGCTGTGCTCGCGCT | |
| 7.37 CTC | AGCGCGAGCACAGCTAAGGCCACGGAGCGA | 1070 |
| PAM TS | GACATCTCGGCCCGAGTGCTGTCAGCTTCA | |
| 7.37 CTC | TGAAGCTGACAGCACTCGGGCCGAGATGTC | 1071 |
| PAM NTS | TCGCTCCGTGGCCTTAGCTGTGCTCGCGCT | |
| 7.37 GTC | AGCGCGAGCACAGCTAAGGCCACGGAGCGA | 1072 |
| PAM TS | GACATCTCGGCCCGACTGCTGTCAGCTTCA | |
| 7.37 GTC | TGAAGCTGACAGCAGTCGGGCCGAGATGTC | 1073 |
| PAM NTS | TCGCTCCGTGGCCTTAGCTGTGCTCGCGCT | |
| 7.37 ATC | AGCGCGAGCACAGCTAAGGCCACGGAGCGA | 1074 |
| PAM TS | GACATCTCGGCCCGATTGCTGTCAGCTTCA | |
| 7.37 ATC | TGAAGCTGACAGCAATCGGGCCGAGATGTC | 1075 |
| PAM NTS | TCGCTCCGTGGCCTTAGCTGTGCTCGCGCT | |
| 7.37 TTT | AGCGCGAGCACAGCTAAGGCCACGGAGCGA | 1076 |
| PAM TS | GACATCTCGGCCCAAATGCTGTCAGCTTCA | |
| 7.37 TTT | TGAAGCTGACAGCATTTGGGCCGAGATGTC | 1077 |
| PAM NTS | TCGCTCCGTGGCCTTAGCTGTGCTCGCGCT | |
| 7.37 CTT | AGCGCGAGCACAGCTAAGGCCACGGAGCGA | 1078 |
| PAM TS | GACATCTCGGCCCTAGTGCTGTCAGCTTCA | |
| 7.37 CTT | TGAAGCTGACAGCACTTGGGCCGAGATGTC | 1079 |
| PAM NTS | TCGCTCCGTGGCCTTAGCTGTGCTCGCGCT | |
| 7.37 GTT | AGCGCGAGCACAGCTAAGGCCACGGAGCGA | 1080 |
| PAM TS | GACATCTCGGCCCTACTGCTGTCAGCTTCA | |
| 7.37 GTT | TGAAGCTGACAGCAGTTGGGCCGAGATGTC | 1081 |
| PAM NTS | TCGCTCCGTGGCCTTAGCTGTGCTCGCGCT | |
| 7.37 ATT | AGCGCGAGCACAGCTAAGGCCACGGAGCGA | 1082 |
| PAM TS | GACATCTCGGCCCTATTGCTGTCAGCTTCA | |
| 7.37 ATT | TGAAGCTGACAGCAATTGGGCCGAGATGTC | 1083 |
| PAM NTS | TCGCTCCGTGGCCTTAGCTGTGCTCGCGCT | |

*The DNA sequences used to generate each dsDNA substrate are shown. The PAM sequences for each are bolded.
TS-target strand.
NTS-Non-target strand.

TABLE 14
Apparent cleavage rates of CasX
491.174 against NTC and NTT PAMs

| PAM | TTC | ATC | CTC | GTC | TTT | ATT | CTT | GTT |
|---|---|---|---|---|---|---|---|---|
| k_{cleave} | 15.6* | 6.66 | 9.45 | 2.52 | 1.33 | 0.0675 | 0.0204 | 0.330 |
| (min⁻¹) | | | | | | | | |

*The rate of TTC cleavage exceeds the resolution of this assay, so the resulting k_{cleave} should be taken as a lower bound.

### Example 6: Assessing Nuclease Activity for Double-Strand Cleavage

[1114] Purified wild-type and engineered CasX variants will be complexed with single-guide RNA bearing a fixed HRS targeting sequence. The RNP complexes will be added to buffer containing MgCl2 at a final concentration of 100 nM and incubated with double-stranded target DNA with a 5′ Cy7.5 label on either the target or non-target strand at a concentration of 10 nM. Aliquots of the reactions will be taken at fixed time points and quenched by the addition of an equal volume of 50 mM EDTA and 95% formamide. The samples will be run on a denaturing polyacrylamide gel to separate cleaved and uncleaved DNA substrates. The results will be visualized and the cleavage rates of the target and non-target strands by the wild-type and engineered variants will be determined. To more clearly differentiate between changes to target binding vs the rate of catalysis of the nucleolytic reaction itself, the protein concentration will be titrated over a range from 10 nM to 1 uM and cleavage rates will be determined at each concentration to generate a pseudo-Michaelis-Menten fit and determine the kcat* and KM*. Changes to KM* are indicative of altered binding, while changes to kcat* are indicative of altered catalysis.

### Example 7: The PASS Assay Identifies CasX Protein Variants of Differing PAM Sequence Specificity

[1115] Experiments were conducted to identify the PAM sequence specificities of CasX proteins 2 (SEQ ID NO: 2), 491, 515, 533, 535, 668, and 672. To accomplish this, the HEK293 cell line PASS_V1.01 or PASS_V1.02 was treated with the above CasX proteins in at least two replicate experiments, and Next-generation sequencing (NGS) was performed to calculate the percent editing using a variety of spacers at their intended target sites.

[1116] Materials and Methods: A multiplexed pooled approach was taken to assay clonal protein variants using the PASS system. Briefly, two pooled HEK293 cell lines were generated and termed PASS_V1.01 and PASS_V1.02. Each cell within the pool contained a genome-integrated single-guide RNA (sgRNA), paired with a specific target site. After transfection of protein-expression constructs, editing at a specific target by a specific spacer could be quantified by NGS. Each guide-target pair was designed to provide data related to activity, specificity, and targetability of the CasX-guide RNP complex.

[1117] Paired spacer-target sequences were synthesized by Twist Biosciences and obtained as an equimolar pool of oligonucleotides. This pool was amplified by PCR and cloned by Golden Gate cloning to generate a final library of plasmids named p77. Each plasmid contained a sgRNA expression element and a target site, along with a GFP expression element. The sgRNA expression element consisted of a U6 promoter driving transcription of gRNA scaffold 174 (SEQ ID NO: 2238), followed by a spacer sequence which would target the RNP of the guide and CasX variant to the intended target site. 250 possible unique, paired spacer-target synthetic sequences were designed and synthesized. A pool of lentivirus was then produced from this plasmid library using the LentiX production system (Takara Bio USA, Inc) according to the manufacturer's instructions. The resulting viral preparation was then quantified by qPCR and transduced into a standard HEK293 cell line at a low multiplicity of infection so as to generate single copy integrations. The resulting cell line was then purified by fluorescence-activated cell sorting (FACS) to complete the production of PASS_V1.01 or PASS_V1.02. A cell line was then seeded in six-well plate format and treated in duplicate with either water or was transfected with 2 μg of plasmid p67, delivered by Lipofectamine™ Transfection Reagent (ThermoFisher) according to the manufacturer's instructions. Plasmid p67 contains an EF-1alpha promoter driving expression of a CasX protein tagged with the SV40 Nuclear Localization Sequence. After two days, treated cells were collected, lysed, and genomic DNA was extracted using a genomic DNA isolation kit (Zymo Research). Genomic DNA was then PCR amplified with custom primers to generate amplicons compatible with Illumina NGS and sequenced on a NextSeq instrument. Sample reads were demultiplexed and filtered for quality. Editing outcome metrics (fraction of reads with indels) were then quantified for each spacer-target synthetic sequence across treated samples.

[1118] To assess the PAM sequence specificity for a CasX protein, editing outcome metrics for four different PAM sequences were categorized. For TTC PAM target sites, 48 different spacer-target pairs were quantified; for ATC, CTC, and GTC PAM target sites, 14, 22, and 11 individual target sites were quantified, respectively. For some CasX proteins, replicate experiments were repeated dozens of times over several months. For each of these experiments, the average editing efficiency was calculated for each of the above described spacers. The average editing efficiency across the four categories of PAM sequence was then calculated from all such experiments, along with the standard deviation of these measurements.

[1119] Results: Table 15 lists the average editing efficiency across PAM categories and across CasX protein variants, along with the standard deviation of these measurements. The number of measurements for each category is also indicated. These data indicate that the engineered CasX variants 491 and 515 are specific for the canonical PAM sequence TTC, while other engineered variants of CasX performed more or less efficiently at the PAM sequences tested. In particular, the average rank order of PAM preferences for CasX 491 is TTC>>ATC>CTC>GTC, or TTC>>ATC>GTC>CTC for CasX 515, while the wild-type CasX 2 exhibits an average rank order of TTC>>GTC>CTC>ATC. Note that for the lower editing PAM sequences the error of these average measurements is high. In contrast, CasX variants 535, 668, and 672 have considerably broader PAM recognition, with a rank order of TTC>CTC>ATC>GTC. Finally, CasX 533 exhibits a completely re-ordered ranking relative to the WT CasX, ATC>CTC>>GTC>TTC. These data can be used to engineer maximally-active therapeutic CasX molecules for a target DNA sequence of interest.

[1120] Under the conditions of the experiments, a set of CasX proteins was identified that are improved for double-stranded DNA cleavage in human cells at target DNA sequences associated with a PAM of sequence TTC, ATC, CTC, or GTC, supporting that CasX variants with an altered spectrum of PAM specificity, relative

TABLE 15
Average editing of selected CasX Proteins at spacers associated
with PAM sequences of TTC, ATC, CTC, or GTC

| CasX | PAM | Average Percent | Standard | Number of |
|---|---|---|---|---|
| Name | Sequence | Editing | Deviation | Measurements |
| 2 | ATC | 0.40 | 1.35 | 336 |
| 2 | CTC | 0.46 | 2.29 | 528 |
| 2 | GTC | 0.69 | 6.27 | 264 |
| 2 | TTC | 5.28 | 7.34 | 1152 |
| 491 | ATC | 6.86 | 8.29 | 364 |
| 491 | CTC | 4.54 | 6.40 | 572 |
| 491 | GTC | 3.40 | 6.68 | 286 |
| 491 | TTC | 40.41 | 23.13 | 1248 |
| 515 | ATC | 4.47 | 5.49 | 252 |
| 515 | CTC | 3.36 | 4.80 | 396 |
| 515 | GTC | 3.65 | 10.75 | 198 |
| 515 | TTC | 36.75 | 24.89 | 864 |
| 533 | ATC | 47.50 | 15.86 | 96 |
| 533 | CTC | 25.90 | 14.74 | 28 |
| 533 | GTC | 6.34 | 8.36 | 44 |
| 533 | TTC | 0.87 | 3.05 | 22 |
| 535 | ATC | 9.70 | 10.20 | 56 |
| 535 | CTC | 11.77 | 13.59 | 88 |
| 535 | GTC | 7.62 | 15.04 | 44 |
| 535 | TTC | 29.29 | 18.78 | 192 |
| 668 | ATC | 44.69 | 24.40 | 56 |
| 668 | CTC | 46.14 | 26.57 | 88 |
| 668 | GTC | 30.48 | 24.06 | 44 |
| 668 | TTC | 55.34 | 28.59 | 192 |
| 672 | ATC | 25.51 | 20.85 | 56 |
| 672 | CTC | 30.05 | 22.95 | 88 |
| 672 | GTC | 14.21 | 13.38 | 44 |
| 672 | TTC | 52.36 | 27.64 | 192 |

### Example 8: CasX:gRNA In Vitro Cleavage Assays

### 1. Assembly of RNP

[1121] Purified wild-type and RNP of CasX and single guide RNA (sgRNA) were either prepared immediately before experiments or prepared and snap-frozen in liquid nitrogen and stored at −80° C. for later use. To prepare the RNP complexes, the CasX protein was incubated with sgRNA at 1:1.2 molar ratio. Briefly, sgRNA was added to Buffer #1 (25 mM NaPi, 150 mM NaCl, 200 mM trehalose, 1 mM MgCl2), then the CasX was added to the sgRNA solution, slowly with swirling, and incubated at 37° C. for 10 min to form RNP complexes. RNP complexes were filtered before use through a 0.22 μm Costar 8160 filters that were pre-wet with 200 μl Buffer #1. If needed, the RNP sample was concentrated with a 0.5 ml Ultra 100-Kd cutoff filter, (Millipore part #UFC510096), until the desired volume was obtained. Formation of competent RNP was assessed as described below. 2. Determining cleavage-competent fractions for protein variants compared to wild-type reference CasX

[1122] The ability of CasX variants to form active RNP compared to reference CasX was determined using an in vitro cleavage assay. The beta-2 microglobulin (B2M) 7.37 target for the cleavage assay was created as follows. DNA oligos with the sequence TGAAGCTGACAGCATTCGGGCCGAGATGTCTCGCTCCGTGGCCTTAGCTGTGCTCGC GCT (non-target strand, NTS (SEQ ID NO: 1069)) and AGCGCGAGCACAGCTAAGGCCACGGAGCGAGACATCTCGGCCCGAATGCTGTCAGC TTCA (target strand, TS (SEQ ID NO: 1068)) were purchased with 5′ fluorescent labels (LI-COR IRDye 700 and 800, respectively). dsDNA targets were formed by mixing the oligos in a 1:1 ratio in 1x cleavage buffer (20 mM Tris HCl pH 7.5, 150 mM NaCl, 1 mM TCEP, 5% glycerol, 10 mM MgCl₂), heating to 950 C for 10 minutes, and allowing the solution to cool to room temperature.

[1123] CasX RNPs were reconstituted with the indicated CasX and guides (see graphs) at a final concentration of 1 μM with 1.5-fold excess of the indicated guide unless otherwise specified in 1x cleavage buffer (20 mM Tris HCl pH 7.5, 150 mM NaCl, 1 mM TCEP, 5% glycerol, 10 mM MgCl₂) at 370 C for 10 min before being moved to ice until ready to use. The 7.37 target was used, along with sgRNAs having spacers complementary to the 7.37 target.

[1124] Cleavage reactions were prepared with final RNP concentrations of 100 nM and a final target concentration of 100 nM. Reactions were carried out at 370 C and initiated by the addition of the 7.37 target DNA. Aliquots were taken at 5, 10, 30, 60, and 120 minutes and quenched by adding to 95% formamide, 20 mM EDTA. Samples were denatured by heating at 950 C for 10 minutes and run on a 10% urea-PAGE gel. The gels were either imaged with a LI-COR Odyssey CLx and quantified using the LI-COR Image Studio software or imaged with a Cytiva Typhoon and quantified using the Cytiva IQTL software. The resulting data were plotted and analyzed using Prism. We assumed that CasX acts essentially as a single-turnover enzyme under the assayed conditions, as indicated by the observation that sub-stoichiometric amounts of enzyme fail to cleave a greater-than-stoichiometric amount of target even under extended time-scales and instead approach a plateau that scales with the amount of enzyme present. Thus, the fraction of target cleaved over long time-scales by an equimolar amount of RNP is indicative of what fraction of the RNP is properly formed and active for cleavage. The cleavage traces were fit with a biphasic rate model, as the cleavage reaction clearly deviates from monophasic under this concentration regime, and the plateau was determined for each of three independent replicates. The mean and standard deviation were calculated to determine the active fraction (Table 16).

[1125] Apparent active (competent) fractions were determined for RNPs formed for CasX2+guide 174+7.37 spacer, CasX119+guide 174+7.37 spacer, CasX457+guide 174+7.37 spacer, CasX488+guide 174+7.37 spacer, and CasX491+guide 174+7.37 spacer as shown in FIG. 1. The determined active fractions are shown in Table 16. All CasX variants had higher active fractions than the wild-type CasX2, indicating that the engineered CasX variants form significantly more active and stable RNP with the identical guide under tested conditions compared to wild-type CasX. This may be due to an increased affinity for the sgRNA, increased stability or solubility in the presence of sgRNA, or greater stability of a cleavage-competent conformation of the engineered CasX:sgRNA complex. An increase in solubility of the RNP was indicated by a notable decrease in the observed precipitate formed when CasX457, CasX488, or CasX491 was added to the sgRNA compared to CasX2.

### 3. In Vitro Cleavage Assays—Determining Cleavage-Competent Fractions for Single Guide Variants Relative to Reference Single Guides

[1126] Cleavage-competent fractions were also determined using the same protocol for CasX2.2.7.37, CasX2.32.7.37, CasX2.64.7.37, and CasX2.174.7.37 to be 16±3%, 13±3%, 5±2%, and 22±5%, as shown in FIG. 2 and Table 16.

[1127] A second set of guides were tested under different conditions to better isolate the contribution of the guide to RNP formation. Guides 174, 175, 185, 186, 196, 214, and 215 with 7.37 spacer were mixed with CasX 491 at final concentrations of 1 μM for the guide and 1.5 μM for the protein, rather than with excess guide as before. Results are shown in FIG. 3 and Table 16. Many of these guides exhibited additional improvement over 174, with 185 and 196 achieving 91±4% and 91±1% competent fractions, respectively, compared with 80±9% for 174 under these guide-limiting conditions.

[1128] The data indicate that both CasX variants and sgRNA variants are able to form a higher degree of active RNP with guide RNA compared to wild-type CasX and wild-type sgRNA.

[1129] The apparent cleavage rates of CasX variants 119, 457, 488, and 491 compared to wild-type reference CasX were determined using an in vitro fluorescent assay for cleavage of the target 7.37.

4. In Vitro Cleavage Assays—Determining k_{cleave} for CasX Variants Compared to Wild-Type Reference CasX

[1130] CasX RNPs were reconstituted with the indicated CasX (see FIG. 4) at a final concentration of 1 pM with 1.5-fold excess of the indicated guide in 1x cleavage buffer (20 mM Tris HCl pH 7.5, 150 mM NaCl, 1 mM TCEP, 5% glycerol, 10 mM MgCl₂) at 370 C for 10 min before being moved to ice until ready to use. Cleavage reactions were set up with a final RNP concentration of 200 nM and a final target concentration of 10 nM. Reactions were carried out at 37° C. except where otherwise noted and initiated by the addition of the target DNA. Aliquots were taken at 0.25, 0.5, 1, 2, 5, and 10 minutes and quenched by adding to 95% formamide, 20 mM EDTA. Samples were denatured by heating at 95° C. for 10 minutes and run on a 10% urea-PAGE gel. The gels were imaged with a LI-COR Odyssey CLx and quantified using the LI-COR Image Studio software or imaged with a Cytiva Typhoon and quantified using the Cytiva IQTL software. The resulting data were plotted and analyzed using Prism, and the apparent first-order rate constant of non-target strand cleavage (k_{cleave}) was determined for each CasX:sgRNA combination replicate individually. The mean and standard deviation of three replicates with independent fits are presented in Table 16, and the cleavage traces are shown in FIG. 5.

[1131] Apparent cleavage rate constants were determined for wild-type CasX2, and CasX variants 119, 457, 488, and 491 with guide 174 and spacer 7.37 utilized in each assay (see Table 16 and FIG. 4). All CasX variants had improved cleavage rates relative to the wild-type CasX2. CasX 457 cleaved more slowly than 119, despite having a higher competent fraction as determined above. CasX 488 and CasX 491 had the highest cleavage rates by a large margin; as the target was almost entirely cleaved in the first timepoint, the true cleavage rate exceeds the resolution of this assay, and the reported k_{cleave} should be taken as a lower bound.

[1132] The data indicate that the CasX variants have a higher level of activity, with k_{cleave} rates reaching at least 30-fold higher compared to wild-type CasX2.

### 5. In Vitro Cleavage Assays: Comparison of Guide Variants to Wild-Type Guides

[1133] Cleavage assays were also performed with wild-type reference CasX2 and reference guide 2 compared to guide variants 32, 64, and 174 to determine whether the variants improved cleavage. The experiments were performed as described above. As many of the resulting RNPs did not approach full cleavage of the target in the time tested, we determined initial reaction velocities (V0) rather than first-order rate constants. The first two timepoints (15 and 30 seconds) were fit with a line for each CasX:sgRNA combination and replicate. The mean and standard deviation of the slope for three replicates were determined.

[1134] Under the assayed conditions, the V0 for CasX2 with guides 2, 32, 64, and 174 were 20.4±1.4 nM/min, 18.4±2.4 nM/min, 7.8±1.8 nM/min, and 49.3±1.4 nM/min (see Table 16 and FIG. 5 and FIG. 6). Guide 174 showed substantial improvement in the cleavage rate of the resulting RNP (˜2.5-fold relative to 2, see FIG. 6), while guides 32 and 64 performed similar to or worse than guide 2. Notably, guide 64 supports a cleavage rate lower than that of guide 2 but performs much better in vivo (data not shown). Some of the sequence alterations to generate guide 64 likely improve in vivo transcription at the cost of a nucleotide involved in triplex formation. Improved expression of guide 64 likely explains its improved activity in vivo, while its reduced stability may lead to improper folding in vitro.

[1135] Additional experiments were carried out with guides 174, 175, 185, 186, 196, 214, and 215 with spacer 7.37 and CasX 491 to determine relative cleavage rates. To reduce cleavage kinetics to a range measurable with our assay, the cleavage reactions were incubated at 100 C. Results are in FIG. 7 and Table 16. Under these conditions, 215 was the only guide that supported a faster cleavage rate than 174. 196, which exhibited the highest active fraction of RNP under guide-limiting conditions, had kinetics essentially the same as 174, again highlighting that different variants result in improvements of distinct characteristics.

[1136] The data support that, under the conditions of the assay, use of the majority of the guide variants with CasX results in RNP with a higher level of activity than one with the wild-type guide, with improvements in initial cleavage velocity ranging from ˜2-fold to >6-fold. Numbers in Table 16 indicate, from left to right, CasX variant, sgRNA scaffold, and spacer sequence of the RNP construct. In the RNP construct names in the table below, CasX protein variant, guide scaffold and spacer are indicated from left to right. 6. In vitro cleavage assays: Comparing cleavage rate and competent fraction of 515.174 and 526.174 against reference 2.2.

[1137] We wished to compare engineered protein CasX variants 515 and 526 in complex with engineered single-guide variant 174 against the reference wild-type protein 2 (SEQ ID NO:2) and minimally-engineered guide variant 2 (SEQ ID NO: 5). RNP complexes were assembled as described above, with 1.5-fold excess guide. Cleavage assays to determine k_{cleave} and competent fraction were performed as described above, with both performed at 37° C., and with different timepoints used to determine the competent fraction for the wild-type vs engineered RNPs due to the significantly different times needed for the reactions to near completion.

[1138] The resulting data clearly demonstrate the dramatic improvements made to RNP activity by engineering both protein and guide. RNPs of 515.174 and 526.174 had competent fractions of 76% and 91%, respectively, as compared to 16% for 2.2 (FIG. 8, Table 16). In the kinetic assay, both 515.174 and 526.174 cut essentially all of the target DNA by the first timepoint, exceeding the resolution of the assay and resulting in estimated cleavage rates of 17.10 and 19.87 min-i, respectively (FIG. 9, Table 16). An RNP of 2.2, by contrast, cut on average less than 60% of the target DNA by the final 10-minute timepoint and has an estimated k_{cleave} nearly two orders of magnitude lower than the engineered RNPs. The modifications made to the protein and guide have resulted in RNPs that are more stable, more likely to form active particles, and cut DNA much more efficiently on a per-particle basis as well.

TABLE 16
Results of cleavage and RNP formation assays

| RNP Construct | K_{cleave}* | | Initial velocity* | | Competent fraction | |
|---|---|---|---|---|---|---|
| 2.2.7.37 | | | 20.4 ± 1.4 | nM/min | 16 ± 3% | |
| 2.32.7.37 | | | 18.4 ± 2.4 | nM/min | 13 ± 3% | |
| 2.64.7.37 | | | 7.8 ± 1.8 | nM/min | 5 ± 2% | |
| 2.174.7.37 | 0.51 ± 0.01 | min⁻¹ | 49.3 ± 1.4 | nM/min | 22 ± 5% | |
| 119.174.7.37 | 6.29 ± 2.11 | min⁻¹ | | | 35 ± 6% | |
| 457.174.7.37 | 3.01 ± 0.90 | min⁻¹ | | | 53 ± 7% | |
| 488.174.7.37 | 15.19 | min⁻¹ | | | 67% | |
| 491.174.7.37 | 16.59 min⁻¹/0.293 | | | | 83%/17% | (guide-limited) |
| | min⁻¹ (10° C.) | | | | | |
| 491.175.7.37 | 0.089 | min⁻¹ (10° C.) | | | 5% | (guide-limited) |
| 491.185.7.37 | 0.227 | min⁻¹ (10° C.) | | | 44% | (guide-limited) |
| 491.186.7.37 | 0.099 | min⁻¹ (10° C.) | | | 11% | (guide-limited) |
| 491.196.7.37 | 0.292 | min⁻¹ (10° C.) | | | 46% | (guide-limited) |
| 491.214.7.37 | 0.284 | min⁻¹ (10° C.) | | | 30% | (guide-limited) |
| 491.215.7.37 | 0.398 | min⁻¹ (10° C.) | | | 38% | (guide-limited) |

| | | | |
|---|---|---|---|
| 515.174.7.37 | 17.10 | min⁻¹** | 76% |
| 526.174.7.37 | 19.87 | min⁻¹** | 91% |

*Mean and standard deviation
**Rate exceeds resolution of assay

### Example 9: Testing Effects of Spacer Length on In Vitro Cleavage Kinetics

[1139] Ribonuclear protein complexes (RNP) of two CasX variants and guide RNA with spacers of varying length were tested for in vitro cleavage activity to determine what spacer length supports the most efficient cleavage of a target nucleic acid and whether spacer length preference changes with the protein.

### Methods:

[1140] Ribonuclear protein complexes (RNP) of CasX and guide RNA with spacers of varying length were tested for in vitro cleavage activity to determine what spacer length supports the most efficient cleavage of a target nucleic acid.

[1141] CasX variant 515 and 526 were purified as described above. Guides with scaffold 174 (SEQ ID NO: 2238) were prepared by in vitro transcription (IVT). IVT templates were generated by PCR using Q5 polymerase (NEB M0491) according to the recommended protocol, template oligos for each scaffold backbone, and amplification primers with the T7 promoter and the 7.37 spacer (GGCCGAGATGTCTCGCTCCG (SEQ ID NO: 1084); targeting tdTomato) of 20 nucleotides or truncated from the 3′ end to 18 or 19 nucleotides. Spacer sequences as well as the oligonucleotides used to generate each template are shown in Table 17. The resulting templates were then used with T7 RNA polymerase to produce RNA guides according to standard protocols. The guides were purified using denaturing polyacrylamide gel electrophoresis and refolded prior to use.

[1142] CasX RNPs were reconstituted by diluting CasX to 1 μM in 1x cleavage buffer (20 mM Tris HCl pH 7.5, 150 mM NaCl, 1 mM TCEP, 5% glycerol, 10 mM MgCl2) and adding sgRNA to 1.2 μM and incubating at 370 C for 10 min before being moved to ice until ready to use. Fluorescently-labeled 7.37 target DNA was purchased as individual oligonucleotides from Integrated DNA Technologies (sequences in Table 17), and dsDNA target was prepared by heating an equimolar mix of the two complementary strands in 1x cleavage buffer and slow-cooling to room temperature.

[1143] RNPs were diluted in cleavage buffer to a final concentration of 200 nM and incubated at 100 C without shaking. Cleavage reactions were initiated by the addition of 7.37 target DNA to a final concentration of 10 nM. Timepoints were taken at 0.25, 0.5, 1, 2, 5, 10, and 30 minutes. Timepoints were quenched by adding to an equal volume of 95% formamide, 20 mM EDTA. Samples were denatured by heating at 95° C. for 10 minutes and run on a 10% urea-PAGE gel. Gels were imaged with an Amersham Typhoon and analyzed with IQTL software. The resulting data were plotted and analyzed using Prism. The cleavage of the non-target strand was fit with a single exponential function to determine the apparent first-order rate constant (k_{cleave}).

### Results:

[1144] Cleavage rates were compared for CasX variants 515 and 526 in complex with sgRNAs with 18, 19, or 20 nucleotide spacers to determine which spacer length resulted in the most efficient cleavage for each protein variant. Consistent with other experiments performed with in vitro-transcribed sgRNA, the 18-nt spacer guide performed best for both protein variants (FIGS. 12A and B, Table 18). The 18-nt spacer was 1.4-fold faster than the 20-nt spacer for protein 515, and it was 3-fold faster than the 20-nt spacer for protein 526. The 19-nt spacer had intermediate activity for both proteins, though again the difference was more pronounced for variant 526. In general, spacers shorter than 20-nt have been observed to have increased activity across a range of proteins, spacers, and delivery methods, but the degree of improvement and the optimal spacer length have varied. These data show that two engineered proteins that are quite similar in sequence (different in only two residues) can have changes in activity as a result of spacer length that are similar in direction but substantially different in degree.

TABLE 17
Relevant sequences and oligonucleotides

| | |
|---|---|
| 7.37 target sequence | IR700-TGAAGCTGACAGCATTC |
| non-target strand | GGGCCGAGATGTCTCGCTCCGTG |
| | GCCTTAGCTGTGCTCGCGCT |
| | (SEQ ID NO: 1069) |
| 7.37 target sequence | IR800-AGCGCGAGCACAGCTAA |
| target strand | GGCCACGGAGCGAGACATCTCGG |
| | CCCGAATGCTGTCAGCTTCA |
| | (SEQ ID NO: 1068) |
| 20-nt spacer sequence | GGCCGAGATGTCTCGCTCCG |
| | (SEQ ID NO: 1085) |
| 18-nt spacer sequence | GGCCGAGATGTCTCGCTC |
| | (SEQ ID NO: 1086) |
| 19-nt spacer sequence | GGCCGAGATGTCTCGCTCC |
| | (SEQ ID NO: 1087) |
| Scaffold 174 template | GAAATTAATACGACTCACTATAA |
| fwd | CTGGCGCTTTTATCTGATTACTT |
| | TGAGAGCCATCACCAGCGACTAT |
| | GTCGTAGTGGGTAAAGCT |
| | (SEQ ID NO: 1088) |
| Scaffold 174 template | CTTTGATGCTCCCTCCGAAGAGG |
| rev | GAGCTTTACCCACTACGACATAG |
| | TCGC (SEQ ID NO: 1089) |
| T7 amplification | GAAATTAATACGACTCACTATA |
| primer | (SEQ ID NO: 169) |
| Scaffold 174 20-nt | CGGAGCGAGACATCTCGGCCCTT |
| spacer primer | TGATGCTCCCTCC |
| | (SEQ ID NO: 1090) |
| Scaffold 174 18-nt | GAGCGAGACATCTCGGCCCTTTG |
| spacer primer | ATGCTCCCTCC |
| | (SEQ ID NO: 1091) |
| Scaffold 174 19-nt | GGAGCGAGACATCTCGGCCCTTT |
| spacer primer | GATGCTCCCTCC |
| | (SEQ ID NO: 1092) |

TABLE 18
Cleavage rates of RNPs with truncated spacers

| | 515 k_{cleave} | 526 k_{cleave} |
|---|---|---|
| Spacer length | (min⁻¹) | (min⁻¹) |
| 18 | 0.215 | 0.427 |
| 19 | 0.182 | 0.282 |
| 20 | 0.150 | 0.143 |

### Example 10: Assessing Binding Affinity to the Guide RNA

[1145] Purified wild-type and improved CasX will be incubated with synthetic single-guide RNA containing a 3′ Cy7.5 moiety in low-salt buffer containing magnesium chloride as well as heparin to prevent non-specific binding and aggregation. The sgRNA will be maintained at a concentration of 10 μM, while the protein will be titrated from 1 μM to 100 μM in separate binding reactions. After allowing the reaction to come to equilibrium, the samples will be run through a vacuum manifold filter-binding assay with a nitrocellulose membrane and a positively charged nylon membrane, which bind protein and nucleic acid, respectively. The membranes will be imaged to identify guide RNA, and the fraction of bound vs unbound RNA will be determined by the amount of fluorescence on the nitrocellulose vs nylon membrane for each protein concentration to calculate the dissociation constant of the protein-sgRNA complex. The experiment will also be carried out with improved variants of the sgRNA to determine if these mutations also affect the affinity of the guide for the wild-type and mutant proteins. We will also perform electromobility shift assays to qualitatively compare to the filter-binding assay and confirm that soluble binding, rather than aggregation, is the primary contributor to protein-RNA association.

### Example 11: Assessing Binding Affinity to the Target DNA

[1146] Purified wild-type and improved CasX will be complexed with single-guide RNA bearing a targeting sequence complementary to the target nucleic acid. The RNP complex will be incubated with double-stranded target DNA containing a PAM and the appropriate target nucleic acid sequence with a 5′ Cy7.5 label on the target strand in low-salt buffer containing magnesium chloride as well as heparin to prevent non-specific binding and aggregation. The target DNA will be maintained at a concentration of 1 nM, while the RNP will be titrated from 1 pM to 100 pM in separate binding reactions. After allowing the reaction to come to equilibrium, the samples will be run on a native 5% polyacrylamide gel to separate bound and unbound target DNA. The gel will be imaged to identify mobility shifts of the target DNA, and the fraction of bound vs unbound DNA will be calculated for each protein concentration to determine the dissociation constant of the RNP-target DNA ternary complex. The experiments are expected to demonstrate the improved binding affinity of the RNP comprising a CasX variant and gRNA variant compared to an RNP comprising a reference CasX and reference gRNA.

### Example 12: Assessing Improved Expression and Solubility Characteristics of CasX Variants for RNP Production

[1147] Wild-type and modified CasX variants will be expressed in BL21 (DE3) E. coli under identical conditions. All proteins will be under the control of an IPTG-inducible T7 promoter. Cells will be grown to an OD of 0.6 in TB media at 37° C., at which point the growth temperature will be reduced to 16° C. and expression will be induced by the addition of 0.5 mM IPTG. Cells will be harvested following 18 hours of expression. Soluble protein fractions will be extracted and analyzed on an SDS-PAGE gel. The relative levels of soluble CasX expression will be identified by Coomassie staining. The proteins will be purified in parallel according to the protocol above, and final yields of pure protein will be compared. To determine the solubility of the purified protein, the constructs will be concentrated in storage buffer until the protein begins to precipitate. Precipitated protein will be removed by centrifugation and the final concentration of soluble protein will be measured to determine the maximum solubility for each variant. Finally, the CasX variants will be complexed with single guide RNA and concentrated until precipitation begins. Precipitated RNP will be removed by centrifugation and the final concentration of soluble RNP will be measured to determine the maximum solubility of each variant when bound to guide RNA.

### Example 13: Guide RNA Guide Scaffold Platform Evolution

[1148] Experiments were conducted to identify guide RNA guide scaffold variants that exhibit improved activity for double-stranded DNA (dsDNA) cleavage. In order to accomplish this, a large-scale library of scaffold variants was designed and tested in a pooled manner for functional knockout of a reporter gene in human cells. Scaffold variants leading to improved knockout were determined by sequencing the functional elements within the pool and subsequent computational analysis.

### Materials and Methods

### Library Design

### Assessment of RNA Secondary Structure Stability

[1149] RNAfold (v2.4.14) (Lorenz R, et al. ViennaRNA Package 2.0. Algorithms Mol Biol.6:26 (2011)) was used to predict the secondary structure stability of RNA sequences, similar to what was done in Jarmoskaite I., et al. A quantitative and predictive model for RNA binding by human pumilio proteins. Mol Cell. 74(5):966 (2019). To assess the AAG_BC value, the ensemble free energy (ΔG) of the unconstrained ensemble was calculated, then the ensemble free energy (ΔG) of the constrained ensemble was calculated. The AAG_BC is the difference between the constrained and unconstrained ΔG values. A constraint string was used that reflects the base-pairing of the pseudoknot stem, scaffold stem, and extended stem, and requires the bases of the triplex to be unpaired.

### Calculation of Pseudoknot Stem Secondary Structure Stability

[1150] Pseudoknot structure stability was calculated for the entire stem-loop spanning positions 3-33, using the triplex loop sequence from guide scaffold 175. Further, a constraint string was generated that enforced pairing of the pseudoknot bases and unpairing of the bases in the triplex loop. Changes in stability could thus only be due to the differences in the sequence of the pseudoknot stem. For example, the pseudoknot sequence AAAACG_CGTTTT was turned into a stem-loop sequence by inserting the triplex loop sequence CUUUAUCUCAUUACUUUGA (SEQ ID NO: 158), so that the final sequence would be AAAACGCUUUAUCUCAUUACUUUGACGTTTT (SEQ ID NO: 159), and the constraint string was: ‘((((((xxxxxxxxxxxxxxxxxxx))))))’ (SEQ ID NO: 160, where x=n).

### Molecular Biology

### Molecular Biology of Library Construction

[1151] The designed library of guide RNA scaffold variants was synthesized and obtained from Twist Biosciences, then amplified by PCR with primers specific to the library. These primers amplify additional sequence at the 5′ and 3′ ends of the library to introduce sequence recognition sites for the restriction enzyme SapI. PCR was performed with Q5 DNA Polymerase (New England Biolabs) and performed according to the manufacturer's instructions. Typical PCR conditions were: 10 ng of template library DNA, 1x Q5 DNA Polymerase Buffer, 300 nM dNTPs, 300 nM each primer, 0.25 μl of Q5 DNA Polymerase in a 50 μl reaction. On a thermal cycler a typical program would be: cycle for 95° C. for 5 min; then 20 cycles of 98° C. for 15 s, 65° C. for 20 s, 72° C. for 1 min; with a final extension of 2 min at 72° C. Amplified DNA product was purified with DNA Clean and Concentrator kit (Zymo Research). This PCR amplicon, as well as plasmid pKB4, was then digested with the restriction enzyme SapI (New England Biolabs) and both were independently gel purified by agarose gel electrophoresis followed by gel extraction (Zymo) according to the manufacturer's instructions. Libraries were then ligated using T4 DNA Ligase (New England Biolabs), purified with DNA Clean and Concentrator kit (Zymo), and transformed into MegaX DH10B T1R Electrocomp Cells (ThermoFisher Scientific) all according to the manufacturer's instructions. Transformed libraries were recovered for one hour in SOC media, then grown overnight at 37° C. with shaking in 5 mL of 2xyt media. Plasmid DNA was then miniprepped from the cultures (QIAGEN). Plasmid DNA was then further cloned by digestion with restriction enzyme Esp3I (New England Biolabs), followed by ligation with annealed oligonucleotides possessing complementary single stranded DNA overhangs and the desired spacer sequence for targeting GFP. The oligonucleotides possessed 5′ phosphorylation modifications, and were annealed by heating to 95° C. for 1 min, followed by reduction of the temperature by two degrees per minutes until a final temperature of 25° C. was reached. Ligation was performed as a Golden Gate Assembly Reaction, where typical reaction conditions consisted of 1 μg of pre-digested plasmid library, 1 pM annealed oligonucleotides, 2 μL T4 DNA Ligase, 2 μL Esp3I, and 1x T4 DNA Ligase Buffer in a total volume of 40 pL water. The reaction was cycled 25 times between 37° C. for 3 minutes and 16° C. for 5 minutes. As above, the library was purified, transformed, grown overnight, and miniprepped. The resulting library of plasmids was then used for the production of lentivirus.

### Library Screening

LV production

[1152] Lentiviral particles were generated by transfecting LentiX HEK293T cells, seeded 24 h prior, at a confluency of 70-90%. Plasmids containing the pooled library were introduced to a second generation lentiviral system containing the packaging and VSV-G envelope plasmids with polyethylenimine, in serum-free media. For particle production, media is changed 12 hours post-transfection, and viruses harvested at 36-48 h post-transfection. Viral supernatant filtered using 0.45 μm PES membrane filters and diluted in cell culture media when appropriate, prior to addition to target cells.

[1153] 72 hours post-filtration, aliquots of lentiviral supernatant were titered by TaqMan qPCR. Viral genomic RNA was isolated using a phenol-chloroform extraction (TRIzol), followed by alcohol precipitation. Quality and quantity of extraction was evaluated by nano-drop reading. Any residual plasmid DNA was then digested with DNase I just prior to cDNA production by ThermoFischer SuperScript IV Reverse Transcriptase. Viral cDNA was subject to serial dilutions through 1:1000 and combined with WPRE based primers and TaqMan Master Mix prior to qPCR by Bio-Rad CFX96. All sample dilutions are added in duplicate and averaged prior to titer calculations against a known, plasmid-based standard curve. Water is always measured as a negative control.

LV Screening (Transduction, Maintenance, Gating, Sorting, gDNA Isolation)

[1154] Target reporter cells are passed 24-48 h prior to transduction to ensure cellular division occurs. At the point of transduction, the cells were trypsinized, counted, and diluted to appropriate density. Cells were resuspended with no treatment, library- or control-containing neat lentiviral supernatant at a low MOI (0.1-5, by viral genome) to minimize dual lentiviral integrations. The lentiviral-cellular mixtures were seeded at 40-60% confluency prior to incubation at 37° C., 5% CO₂. Cells were selected for successful transduction 48 h post-transduction with puromycin at 1-3 pg/ml for 4-6 days followed by recovery in HEK or Fb medium.

[1155] Post-selection, cells were suspended in 4′,6-diamidino-2-phenylindole (DAPI) and phosphate-buffered saline (PBS). Cells were then filtered by Coming strainer-cap FACS tube (Prod. 352235) and sorted on the Sony MA900. Cells were sorted for knockdown of the fluorescent reporter, in addition to gating for single, live cells via standard methods. Sorted cells from the experiment were lysed, and the genome was extracted using a Zymo Quick-DNA Miniprep Plus following the manufacturer's protocol.

### Processing for Next Generation Sequencing (NGS)

[1156] Genomic DNA was amplified via PCR with primers specific to the guide RNA-encoding DNA, to form a target amplicon. These primers contain additional sequence at the 5′ ends to introduce Illumina read and 2 sequences. Typical PCR conditions would be: 2 μg of gDNA, 1x Kapa Hifi buffer, 300 nM dNTPs, 300 nM each primer, 0.75 μl of Kapa Hifi Hotstart DNA polymerase in a 50 μl reaction. On a thermal cycler, cycle for 95° C. for 5 min; then 15 cycles of 98° C. for 15 s, 62° C. for 20 s, 72° C. for 1 min; with a final extension of 2 min at 72° C. Amplified DNA product is purified with Ampure XP DNA cleanup kit. A second PCR step was done with indexing adapters to allow multiplexing on the Illumina platform. 20 μl of the purified product from the previous step was combined with 1x Kapa GC buffer, 300 nM dNTPs, 200 nM each primer, 0.75 μl of Kapa Hifi Hotstart DNA polymerase in a 50 μl reaction. On a thermal cycler, cycle for 95° C. for 5 min; then 5-16 cycles of 98° C. for 15 s, 65° C. for 15 s, 72° C. for 30 s; with a final extension of 2 min at 72° C. Amplified DNA product is purified with Ampure XP DNA cleanup kit. Quality and quantification of the amplicon was assessed using a Fragment Analyzer DNA analyzer kit (Agilent, dsDNA 35-1500 bp). Amplicons were sequenced on the Illumina Miseq™ (v3, 150 cycles of single-end sequencing) according to the manufacturer's instructions.

### NGS Analysis (Sample Processing and Data Analysis)

[1157] Reads were trimmed for adapter sequences with cutadapt (version 2.1), and the guide sequence (comprising the scaffold sequence and spacer sequence) was extracted for each read (also using cutadapt v 2.1 linked adapters to extract the sequence between the upstream and downstream amplicon sequence). Unique guide RNA sequences were counted, and then each scaffold sequence was compared to the list of designed sequences and to the sequence of guide scaffolds 174 (SEQ ID NO: 2238) and 175 (SEQ ID NO: 2239) to determine the identity of each.

[1158] Read counts for each unique guide RNA sequence were normalized for sequencing depth using mean normalization. Enrichment was calculated for each sequence by dividing the normalized read count in each GFP-sample by the normalized read count in the associated naive sample. For both selections (R2 and R4), the GFP- and naive populations were processed for NGS on three separate days, forming an enrichment value for each scaffold in triplicate. An overall enrichment score per scaffold was calculated after summing the read counts for the naive and GFP-samples across triplicates.

[1159] Two enrichment scores from different selections were combined by a weighted average of the individual log₂ enrichment scores, weighted by their relative representations within the naive population.

[1160] Error on the log₂ enrichment scores was estimated calculating a 95% confidence interval on the average enrichment score across triplicate samples. These errors are propagated when combining the enrichment values for the two separate selections.

### Results and Discussion

Library design, ordering, and cloning

[1161] A library of guide RNA variants was designed to both test variation to the RNA scaffold in an unbiased manner and in a targeted manner that focused on key modules within the RNA scaffold.

[1162] In the unbiased portion of the library, all single nucleotide substitutions, insertions, and deletions were designed to each residue of guide scaffolds 174 (SEQ ID NO: 2238) and 175 (SEQ ID NO: 2239) (˜2800 individual sequences). Double mutants were designed to specifically focus on areas that could possibly be interacting; thus if in the CryoEM structure (PDBid: 6NY2), two residues were involved in a canonical or non-canonical base pairing interaction, or two residues were predicted to pair in the lowest-energy structure predicted by RNAfold (v2.4.14), then the corresponding residues in guide scaffolds 174 and 174 were mutated (including all possible substitutions, insertions, and deletions of both residues). Adjacent residues to these ‘interacting’ residues were also mutated; however for these only substitutions of each of the two residues were included. In the final library, ˜27K sequences were designed with two mutations relative to guide scaffolds 174 or 175.

[1163] In the portion of the library devoted to specific mutagenesis of key regions of the RNA scaffold, modifications were designed to: the pseudoknot region, the triplex region, the scaffold bubble, and the extended stem (see FIG. 18 for region identification). In each of these targeted sections of the library, the entire domain was mutagenized in a hypothesis-driven manner (FIG. 19). As an example, for the triplex region, each of the base triplets that comprise the triplex was mutagenized to a different triplex-forming motif (see FIG. 20). This type of mutagenesis is distinct from that employed in the scaffold stem bubble, in which all possible substitutions of the bases surrounding the bubble were mutagenized (i.e., with up to 5 mutations relative to guide sequences 174 or 175). In contrast again, the 5 base-pairs comprising the pseudoknot stem were completely replaced with alternate Watson-Crick pairing sequence (up to 10 distinct bases mutagenized).

[1164] A final targeted section of the library was meant to optimize for sequences that were more likely to form secondary structures amenable to binding of the protein. In short, the secondary structure stability of a sequence was predicted under two conditions: 1) in the absence of any constraints, 2) constrained such that the key secondary structure elements such as pseudoknot stem, scaffold stem, and extended stem are formed (see Materials and Methods). Our hypothesis was that the difference in stability between these two conditions (called here ΔΔG_BC) would be minimal for sequences that are more amenable to protein binding, and thus we should search for sequences in which this difference is minimal).

[1165] The designed library was ordered from Twist (˜40K distinct sequences), and synthesized to include golden gate sites for cloning into a lentiviral plasmid backbone that also expressed the protein STX119 (see Materials and Methods). A spacer sequence targeting the GFP gene was cloned into the library vector, effectively creating single-guide RNAs from each RNA scaffold variant to target the GFP gene. The representation of the designed library variants was assessed with next generation sequencing (see Materials and Methods).

### Library Screening and Assessment

[1166] The plasmid library containing the guide RNA variants and a single CasX protein (version 119) was made into lentiviral particles (see Materials and Methods); particles were titered based on copy number of viral genomes using a qPCR assay (see Materials and Methods). A cell line stably expressing GFP was transduced with the lentiviral particle library at a low multiplicity of infection (MOI) to enforce that each cell integrated at most one library member. The cell pool was selected to retain only cells that had a genomic integration. Finally, the cell population was sorted for GFP expression, and a population of GFP negative cells was obtained. These GFP negative cells contained the library members that effectively targeted the CasX RNP to the GFP protein, causing an indel and subsequent loss of function.

[1167] Genomic DNA from the unsorted cell population (“naive”) and the GFP negative population was processed to isolate the sequence of the guide RNA library members in each cell. To determine the representation of guide RNAs in the naive and GFP negative populations, next generation sequencing was performed. Enrichment scores were calculated for each library member by dividing the library member's representation in the GFP-population by its representation in the naive population: A high enrichment score indicates a library member that is much more frequent in the active, GFP negative population than in the starting pool, and thus is an active variant capable of effectively generating an indel within the GFP gene (enrichment value>1, log₂ enrichment>0). A low enrichment score indicates a library member that is depleted in the active GFP-population compared to the naive, and thus ineffective at forming an indel (enrichment value <1, log₂ enrichment <0). As a final statistic for comparison, the relative enrichment value was calculated as the enrichment of a library member (in the GFP negative vs naive population), divided by the enrichment of the reference scaffold sequence (in the GFP negative vs naive population). (In log space, these values are simply subtracted.) The enrichment values of the reference scaffold sequences are shown in FIG. 21).

[1168] The screen was performed multiple times, with independent production of lentiviral particles, transduction of cells, selection and sorting to obtain naive and GFP negative populations, and sequencing to learn enrichment values of each library member. These screens were called R2 and R4, and largely reproduce the enrichment values obtained for single nucleotide variants on guide scaffolds 174 and 175 (FIG. 22). The screen was able to identify many possible combinations of mutations that were enriched in the functional GFP-population, and thus can lead to functional RNPs. In contrast, no guides that contained non-targeting spacers were enriched, confirming that enrichment is a selective cutoff (data not shown). The full set of mutations on guide scaffolds 174 and 175 that were enriched are given in Tables 19 and 20, respectively. These lists reveal the sequence diversity still capable of achieving targeted, functional RNPs.

### Single Nucleotide Mutations Indicate Mutable Regions of the Scaffold:

[1169] To determine scaffold mutations that lead to similar or improved activity relative to guide scaffolds 174 and 175, enrichment values of single nucleotide substitutions, insertions, or deletions were plotted (FIG. 23). Generally, single nucleotide changes on 174 were more tolerated than 175, perhaps reflecting higher activity of 174 in this context and thus a higher tolerance to mutations that dampen activity (FIG. 21 and FIG. 24). Single nucleotide mutations on 175 that were favorable were also favorable in the 174 context in the vast majority of cases (FIG. 24), and thus the values for mutations on scaffold 175 were taken to be a more stringent readout of mutation effects. Key mutable areas were revealed by this analysis, as described in the following paragraphs:

[1170] The most notable feature was the extended stem, which showed similar enrichment values as the reference sequences 174 or 175, suggesting that the scaffold could tolerate changes in this region, similar to what has been seen in the past and would be predicted by structural analysis of the CasX RNP in which the extended stem is seen to have little contact with the protein.

[1171] The triplex loop was another area that showed high enrichment relative to the reference scaffold, especially when made in guide scaffold 175 (e.g., especially mutations to C15 or C17). Notably, the C17 position in 175 is already mutated to a G in scaffold 174, which is one of the two highly enriched mutations at this position to scaffold 175.

[1172] Changes to either member of the predicted pair in the pseudoknot stem between G7 and A29 were both highly enriched relative to the reference, especially in guide scaffold 175. This pair is a noncanonical G:A pairing in both guide scaffolds 174 and 175. The most strongly enriched mutation at these positions were in guide scaffold 175, converting A29 to a C or a T; the first of which would form a canonical Watson-Crick pairing (G7:C29), and the second of which would form a GU wobble pair (G7:U29)., both of which may be expected to increase stability of the helix relative to the G:A pair. Converting the G7 to a T was also highly enriched, which would form a canonical pair (U7:A29) at this position. Clearly, these positions favor being more stably paired. In general, the 5′ end was mutable, with few changes leading to de-enrichment.

[1173] Finally, the insertion of a C at position 54 in guide scaffold 175 was highly enriched, whereas deletion of either the A or the inserted G at the analogous position in guide scaffold 174 both had similar enrichment values as the reference. Taken together, the guide scaffold may prefer having two nucleotides in this scaffold stem bubble, but it may not be a strong preference. These results are further examined in the sections below.

### Pseudoknot Stem Stability is Integral to Scaffold Activity

[1174] To further explore the effect of the pseudoknot stem on scaffold activity, the pseudoknot stem was modified in the following ways: (1) the base pairs within the stem were shuffled, such that each new pseudoknot has the same composition of base pairs, but in a different order within the stem; (2) the base pairs were completely replaced with random, WC-paired sequence. 291 pseudoknot stems were tested. Analysis of the first set of sequences shows a strong preference for the G-A pair to be in the first position of the pseudoknot stem, relative to the other possible positions (2-6; in the wildtype sequence it is in position 5; FIG. 25), while the results demonstrate that having a GA pair at each of the positions 2-6 in the pseudoknot stem is generally unfavorable, with low average enrichment. Having the G-A bases at position 1 likely stabilizes the pseudoknot stem by allowing the rest of the helix to form from stacking, Watson-Crick pairs only. This result further supports that the scaffold prefers a fully-paired pseudoknot stem.

[1175] A substantial number of pseudoknot sequences had positive log₂ enrichment, suggesting that replacing this sequence with alternate base pairs was generally tolerated (pseudoknot structure in FIG. 26). To further test the hypothesis that a more stable helix in the pseudoknot stem would result in a more active scaffold, the secondary structure stability of each pseudoknot stem was calculated (Materials and Methods). A strong relationship was observed between pseudoknot stability and enrichment, and thus activity (FIG. 27: more active scaffold have stable pseudoknot stems), with guide scaffolds with stable pseudoknot stems (<−7 kcal/mol) having high enrichment and guide scaffolds with destabilized pseudoknot stems (>−3 kcal/mol) having very low enrichment.

### Double Mutations Indicate Mutable Regions of the Guide Scaffold:

[1176] Double mutations to each reference guide scaffold were examined to further identify mutable regions within the scaffold, and potential mutations to improve scaffold activity. Focusing on just a single pair of positions-positions 7 and 29 which are predicted to form a noncanonical G:A pair in the pseudoknot stem and supports mutagenesis (see sections above)-we can plot all 64 double mutations for this pair of positions (FIG. 28). Canonical pairs are favored at these two positions (e.g. substitution of a C at position 7 and a G at position 29 creates a G:C pair and is enriched; substitution of a C at position 7 and an insertion of a G at position 29 similarly creates a G:C pair, substitution of an A at position 7 and a U at position 29 creates an A:U pair). No pair of insertions was enriched, perhaps because inserting a canonical pair here is not sufficient to stabilize the helix given that the G:A pair is shifted up a position in the helix and not removed entirely. Surprisingly, several enriched double mutations did not form canonical pairs; e.g. substitutions of U at position 7 and C at position 29 (which forms a noncanonical U:C pair), substitutions of U at position 7 and U at position 29 (forming a U:U pair), as well as a few others (FIG. 28). It is possible that a purine:purine pair is substantially more disruptive to the helix than other noncanonical pairs. Indeed, substitution of an A at position 7 and G at position 29 again forms an A:G pair, which is not enriched at this position.

[1177] Enrichment values of double substitutions within each of the key structural elements of guide scaffold 175 were determined from heat maps in which each position could have up to three substitutions. It was determined that the scaffold stem was the least tolerant to mutation, suggesting a tightly constrained sequence in this region.

[1178] The results demonstrate substantial changes may be made to the guide scaffold that can still result in functional gene knockout when utilized in an editing assay. In particular, the results demonstrate key positions that may be utilized to improve activity through modifications in the guide scaffold, including increased secondary structure stability of the pseudoknot stem within the scaffold.

TABLE 19
Guide 174 mutations and resulting relative enrichment

| Log₂ | |
|---|---|
| enrichment | Mutations on gRNA scaffold 174* (SEQ ID NO: 2238) |
| 3.25 to 3.5 | G79A,A80G; T34A,G78T; G7T,G75A; G78A,A80T; ^{∧}C2,A33T; ^{∧}A1,C68T; |
| | TG3CT,CGC6TAG,GAG28CTA,CA32AG; TG3CA,GC7AA,GA28TT,CA32TG; |
| | ^{∧}C4,C6G,T12_,G17C,GAG28CCC,C32G,A80C; T9C,T14A,T71A,C73A; |
| | C70A,G77T |
| 3.0 to 3.25 | A29T,G78T; T9C,G17C,A27T,G79_; C2G,A21G; ^{∧}A81,^{∧}C81; T71A,C73A; |
| | T14C,T16G; ^{∧}T64,^{∧}G81; T9C,G17C,^{∧}TG65; C2G,T16A; |
| | G7C,TC14AT,G17A,T34A; G75A,G77A; G7C,A21T; T-.3.CA,GC.7.-T, |
| | G28_,-A.33.TG,^{∧}T84; T65C,C82T; |
| | GCTCCC63_^{∧}AATGAAAA70,^{∧}TTTTCATT76,GGGAGC77_; ^{∧}C2,G7A,A27T; |
| | T9C,G17C,C67G; ^{∧}A78,^{∧}T78; T3C,GCG5AGA,AGC29GCT,A33G; |
| | T9C,G17C,G78C; T3C,GC5TG,AGC29CAA,A33G; T9A,^{∧}T68,G77A; |
| | G7A,T9G; T65A,^{∧}G77; ^{∧}G70,^{∧}C75; C2T,G79C; ^{∧}C66,G78A; A29C,G75A; |
| | C15A,A60G; C67G,^{∧}A78; T14C,G17T,G40A,A76G; T34A,CT64TC; |
| | ^{∧}A69,T69A; T45G,G79T; T69C,^{∧}C76; C2A,G54C; A13C,C15A,G74C; |
| | C70G,^{∧}A75; A76G,G77C; C67T,G78C; TG3CC,A29C,CA32GG; ^{∧}T7,A29C; |
| | C2A,T34A; ^{∧}A66,^{∧}A66; C66T,A80C; ^{∧}G17; ^{∧}C76,^{∧}A76; A29C; |
| | C15G,C67G,T72G; ^{∧}T70,^{∧}A70; C15G,T16G; C64T,C66A; T69G,G74C; |
| | ^{∧}A3,G74C; ^{∧}T65,^{∧}T80 |
| 2.9 to 3.0 | A29C,A33T; C64T,G78A; ^{∧}C64,A80T; ^{∧}A74; T65A,^{∧}A80; ^{∧}T69,G75T; |
| | ^{∧}C79,^{∧}A79; A29G,T59A; T69G,G75C,G78A; ^{∧}G70,^{∧}A70; |
| | G7A,TC14CG,G17A,C64T; ^{∧}T69,^{∧}A76; T9C,G17C,C68T,T72C; ^{∧}T69,A76G; |
| | A33T,C66G; C66T,C67G; TTC71ACA,^{∧}GGATGT75; A13G,T14A; |
| | T69A,G74C; G74T,A76G; G77C,G78A; A27C,T84G; C2_,C66G; T71C,G75C; |
| | TC14AG,G78A; T3G,A33T; T9C,G28A; ^{∧}A1,C2T; C68T,T72C; |
| | TGGC3CCAG,C8A,GA26_,--A.33.TGG; C64T,C66G; ^{∧}A67,C67G; |
| | C68T,G74A,G77C; G7T; C2T,G78T; C68_,G77T; T25C,A29C; ^{∧}A78,G78A; |
| | ^{∧}C78,G78C; G7C,A60G; T34A,T45A; T3_,G7A,^{∧}A9,^{∧}T28,A29G,A33_; |
| | ^{∧}CAG70,T72G,G--.74.AGT; A27G,A29C; T9C,G17C,T47C; ^{∧}T19; ^{∧}A65,^{∧}T65; |
| | C67G,C68T |
| 2.8 to 2.9 | T3C,G5T,C8G,GA28CC,CCA31AAG; T69C,A76G; C66T,A80T; ^{∧}G13; |
| | C2_,T65G; G7C,T9G; T9C,G17C,TT71AC; C6G,A29T; ^{∧}C66,^{∧}C79; |
| | C70A,A76T; T3A,CG6AC,AG29GT,A33G; ^{∧}T7,T12_; ^{∧}T69,^{∧}A76,A88C; |
| | C35G,G58C; ^{∧}A79,^{∧}T79; T16_,C67T,G79_; G7T,T9A; A29T,C37T,C66G,^{∧}G77; |
| | C2_,G81A; C15G,T34G; T3_,^{∧}T9,^{∧}C28,A29C,C32_; ^{∧}T76,^{∧}A76; G7C,A27T; |
| | C2_,G79C; TGGC3ACAG,GA26_,--A.33.TGT; ^{∧}G65,^{∧}G77; |
| | ^{∧}AC1,GC5_,C8T,GA26_,G30A,^{∧}GT34; T9C,G17C,C66T,A80T; T71G,T72G; |
| | G4C,CT8GC,G17C,GA28AC,C32G,T69C,G75C; C41A,G51T; ^{∧}T78; |
| | T9C,G17C,T65A,A80C; AG29CA,C82G; T9G,C82T; T45A,T47C; C2T,T3A; |
| | T65A,A80G; C2G,G4A,C32T; G7C,T59G; T9C,T14G; C2G,A29C,T52A; |
| | T9C,G17C,-A.53.CC; T9C,T69_,A76_; C68A,G75C; A1G,A33T; |
| | T3_,^{∧}T9,G28_,^{∧}G32; ^{∧}G70,G75C; ^{∧}C54,G54C; ^{∧}T79,G79A; G17C,C70T,A76G; |
| | G77A; ^{∧}T69,A76C; T65A,^{∧}C80; ^{∧}A66,G79_; T9G,^{∧}G85; ^{∧}TGGAAGAT63, |
| | C---.66.TCGG,C68A,GGAGGGAG74_,^{∧}A83; ^{∧}T2; G7A,A29C; ^{∧}A69,^{∧}C76; |
| | C6A,A29C; C2_,T9C,G17C,GA79TG |
| 2.7 to 2.8 | T34A,^{∧}T37; A36T,T65C; C2_,T69G; C73A,G74C; G17_; ^{∧}G65,^{∧}A65; |
| | ^{∧}T67,C67T; C2G,A29T; T9C,G17C,^{∧}C66,^{∧}G74; C70A,T71C; T14A,C15T; |
| | G4C,C32G,G78C; T9C,G17C,T34A; ^{∧}A66,^{∧}C79; AGT53GTG; G79_; |
| | T9G,T14A; ^{∧}C64,^{∧}C80; T65C,^{∧}G66; ^{∧}GT1,G7A,T9C; A60T,G78T; |
| | T9C,G17C,C67A,G79A; TC65CG,A80G; T14C,T16C; T3_; |
| | ^{∧}CGAAC70,T71A,G74C; G7T,C8G; T3A,GC7CG,GA28CG,A33T; C66T,G78T; |
| | A1G,T9C,G17C; T69C,C70A; C70T,T72G; T69C,T71G,A80T; T16G,A29C; |
| | T11G,A29C; G17A,^{∧}TA75,A88C; G7T,G40A,A61G; ^{∧}AC81,A88C; ^{∧}A71; |
| | G5C,C8G,GA28AC,C31G,C73T; G74T,A76C; ^{∧}T68,^{∧}A76; C2_,C70A; |
| | T9C,G28T; G28T,A29C; ^{∧}C29; A29C,GA75AC; ^{∧}T52,G54C; G7A,T9C,G17C; |
| | T9C,G17C,G79A; --A.29.CAC; ^{∧}A68,G77A; ^{∧}T69; G7C,T9C; A80C,C82T; |
| | ^{∧}C75,G75T; T14A,A29C; T72C,C73A; T9C,G17C,C66A,G79_; C2_,A33T; |
| | ^{∧}T2,C64T; ^{∧}AT79,A88C; C66G,A80C; ^{∧}A67,^{∧}T78; ^{∧}G67,G78A; ^{∧}A76; |
| | A21G,^{∧}C66,^{∧}T77; C2A,A36G,T69A; G63T,T71C; T9C,G17C,-G.77.CT; |
| | ^{∧}T2,T34A; C68T,^{∧}C77; T9C,G17C,T72C; T69A,C70T; CT15TA,A18T; |
| | TGG3ACA,C8G,GA28CC,CCA31TGT; T9C,A29C; C6G,G30C; -T.3.AA,C67G; |
| | C73_; ^{∧}G68,^{∧}A76; T69C,^{∧}A76; A80G; T69C,A76_; ^{∧}G68,^{∧}T77 |
| 2.6 to 2.7 | T9A,A29C; A76G; T9C,G17C,AG76CC; T9C,^{∧}A13; ^{∧}A67,^{∧}T78,A88C; |
| | C70A,T72A; C66G,^{∧}T79; ^{∧}T64,C64T; ^{∧}A70,C70G; ^{∧}G65,A80C; |
| | T9C,G17C,C66T,G78C; C2_,T9G; T69_,A76T; T3A,G7A,A29T,A33G; |
| | T45G,C68A; ^{∧}T65,^{∧}T80,A88C; C66G; C64T,T71G; C2G,G54T; A1G,T3A; |
| | ^{∧}G70,G75T; T65A,^{∧}T80; -T.3.AC,GC.7.A-, |
| | GAG28TGC,CA32GG,T72A,^{∧}G74,A76G; A21C; T69G,^{∧}A76; C68G,C70A; |
| | C67T,A80T; ^{∧}A70,^{∧}C75; T9A,T14C; T3A,CGC6TCT,GAG28AGA,A33T; |
| | G54_; C68T; ^{∧}T65,G79C; C2_; C67G,G79T; CT2TG,G7A,G77C; T71G,G74A; |
| | C66T,G81A; A29T; --A.29.CAT,A88C; T69_,^{∧}C76; T9C,G17C,^{∧}G68; |
| | ^{∧}A69,T69C; A29C,G30T; T69_; G17C; ^{∧}A67,G78C; T65A; ^{∧}G79,^{∧}T79; |
| | A76G,G77T; ^{∧}GC1,A88C; A27T,A29C; ^{∧}CA79,A88C; T69_,G75T; |
| | C38G,^{∧}C56,G77A; C68T,G77C; A29C,AG39GT,T52C; G79T,A80T; |
| | G7T,A61T; T16C; ^{∧}A13; G7C,C15G; G5C,C8G,GA28AC,C31G; C2_,G77C; |
| | A29C,T52A; G75C,A76G; T9C,G17C,^{∧}C76; C8G,A29C; |
| | TGG3GTC,C8G,GA28AC,CCA31GAC; |
| | C64_^{∧}GTG67,C68A,G77T,^{∧}CAC79,G81_; ^{∧}T68,G79_; ^{∧}A70,C70A; |
| | T65A,AG76GA; ^{∧}C70,^{∧}C70; C68G,G77T; C6T,A29T; ^{∧}T81; ^{∧}G67,^{∧}A67; |
| | TGG3GCA,C8A,A29C,CCA31TGC; G7A,A27C,A29G,A80G; G78A; |
| | T52G,G54C; T9C,G17C,T65A,C67T; A1C,^{∧}C64,^{∧}T81; ^{∧}T80,A80C; |
| | C67A,C73T; C73T,A80C; C67A,T69C; G7A,A76T,A80G; C2_,C15G; |
| | T69C,G77T; CT2_,G79T; G7C,^{∧}G28; ^{∧}C79; ^{∧}A80; ^{∧}G1,^{∧}C1; ^{∧}G65,A80T; |
| | G7T,A29_; -T.3.AC,GC.7.A-,GAG28TGC,CA32GG,T65A; |
| | T9C,AT14,G17C,^{∧}C29; A29T,T69C; T9C,A29G; C64T,T65C; |
| | ^{∧}TG70,T71A,C73_,G75T; T65G,C66T; T59C,^{∧}C66; T72A,G74A; C2T,T72C; |
| | T71C,A76G; T65G,A80T; TG3_,^{∧}TG7,GA26_^{∧}AG33 |
| 2.5 to 2.6 | T9C,G17C,^{∧}G81; --A.29.CAT; C68T,A76G; A29C,G79A; G17C,C67G,C70T; |
| | ^{∧}G66,C66G; A29T,G63A,C66A; G28C,A29C; T3G,C67A; T69C,T71C; |
| | T3A,GC7CA,GA28TG,A33G; C70G,G74A; ^{∧}C2,G4C,C8_,^{∧}CGC28,CCA31_; |
| | C2_,C68T; C66A,A80T; T3A,G5C,GC7AA,GA28TT,C31G,A33T; |
| | T9C,G17C,T72G; T9C,G17C,A29C; ^{∧}C70,G75T; C66T; C66T,G78A; |
| | A36T,G54C,C68T; ^{∧}G9,A29T; A76C; T69C,G77C; ^{∧}A77,^{∧}G77; T71G,G74C; |
| | C67T; C73G; T71G,AG76GA; ^{∧}C64,T65C; T3G,C68A; G74C; C67T,T69A; |
| | ^{∧}A69; ^{∧}A66,C66T; T71C; T14G,T16C; T9C,G79T; T65C; ^{∧}C15,G17C; |
| | ^{∧}T65,^{∧}C79; C70G,T71G; G74C,G75T; C2_,C68G; G7T,A27G; ^{∧}CA76,A88C; |
| | ^{∧}T65,^{∧}A65; T9C,G17C,T45A; A18C,^{∧}A66; A80C; G7C,TC14CT,G17A; |
| | TG3GC,G7A,A29T,CA32GC; T16G,A29C,G63T,T71C; C2A,G54T,T71C; |
| | ^{∧}T8,A29C; T9C,TG16GC; C70T,G77T; G75T,A76G; T69A; T16A,A18G; |
| | G77A,G78C; A1_,T59C; T14G,T16G; ^{∧}A60,G81A; A29G,A83G; |
| | T34A,GA79TC; T69C,G75A; G7T,T59A; G7T,C82G; A36T,G81T; C2_,G81T; |
| | T14C,T72_; --A.29.CAC,A88C; TGG3_,^{∧}AAG9,GA28CT,C31G,A33G; |
| | G17C,A18G; C66G,G77A; ^{∧}C5,C6T,C8_,G28C,GC30CG; C82T; G54A,^{∧}G56; |
| | C2_,C66T; G17C,A18C; G17C,G54_; G28A,T65C; C6T,A29C; G7A,T9C,^{∧}T79; |
| | T9C,GA17CT; G74A,G75T; C68A,C70G; G42C,C50G; ^{∧}C70,^{∧}C75; ^{∧}T66,^{∧}C66; |
| | T3C,CGC6GCT,G28_,^{∧}A32,A33G; C73A,G74A; |
| | TG3AC,C6A,AG29CT,CA32GG; C67A,G79A; A76_; C73G,G74T; |
| | TG3CA,GC7AG,GA28CG,CA32TG; T9C,T14C,T71A,C73A; G81C; |
| | A1G,T16A; T69A,^{∧}G74; C68_; C2A,A60C; T9C,G54T; T14C,C15G; |
| | ^{∧}G66,^{∧}G66; T16C,A18G; ^{∧}G68,G77C; A29T,-G.78.CC; G7T,^{∧}T61; CT2_,T72G; |
| | A1G; T65C,C66A; G7C,T34A; ^{∧}C35,T59G; ^{∧}AG77,A88C; ^{∧}TG67,A88C; |
| 2.4 to 2.5 | G54C,T59A; T69G,G75C; C68A,A76G; ^{∧}AT65,A88C; C68T,G77T; G7T,A29C; |
| | T65A,T71A,G74A; T16A; ^{∧}C65,^{∧}A65; ^{∧}T67,G79_; ^{∧}G71; ^{∧}C18; ^{∧}C29,A29T; |
| | G79A; T69G,T71A; T71C,T72C; C2_,T3_; ^{∧}T67,G78T; |
| | CTCCCTCT64_,C73G,AGG76TTC,^{∧}TCCCA82; T65A,A83G; C70A,G74A; |
| | G7C,TC14AT,G17A,T34C; G7T,A33C,A36C,A76G; T-.3.CA,GC.7.A-, |
| | AG29GC,CA32TG; C2_,A80G; -T.3.AC,C6T,C8_,G28C,G30C,CA32GT; |
| | G7C,A83G; C2_,C67A; T3G,A29C,T34G,G77A; C2G,A21G,T65C; |
| | G40A,T59A; ^{∧}A66,^{∧}G66; G81A; C2_,A29G; ^{∧}T64,G81A; |
| | ^{∧}CGC2,CGC6_,GAG28_^{∧}AGG33; ^{∧}C77; T69A,A76G; ^{∧}T78,^{∧}T78; C66A,^{∧}C79; |
| | C2_,G7A,T34A; T3C,C6T,G30A,A33G,^{∧}C55; GC7CG,GA28AG; |
| | T3C,G5C,GC7TA,G28T,C31G,A33G; ^{∧}T68,^{∧}C77; ^{∧}T77,G77A; A27G,^{∧}GT77; |
| | ^{∧}G66,^{∧}T79,A88C; T9C,^{∧}G69,^{∧}A76; C68T,G75C; ^{∧}T81,^{∧}T81; ^{∧}C66; T9C,G28C; |
| | T14A,A29C,C66T; ^{∧}A65; T3A,G5C,C8A,A29C,C31G,A33T; CT2_,T71A; |
| | G7C,C15G,A33T; G77A,^{∧}T78; G63T,C82A; G7A,C15G,G54A,A60C,G79T; |
| | ^{∧}A13,^{∧}G13; T72G,C73T; A36C,G54T; T3G,G7T; ^{∧}G65,T65C; T65G,C66G; |
| | G77C; T45G; C15A; C41T,G51A; T14A; C2T,G54T; A76T; T71A,A76G; |
| | ^{∧}G66,^{∧}T79; ^{∧}A7,A29C; TGG3AAC,C8G,GA28CC,CCA31GTG; ^{∧}A1; ^{∧}T29; |
| | T71G,G74T; T45A; ^{∧}AT78,A88C; ^{∧}A3,GG4CC,C8_,GA28CG,CCA31GAT; |
| | C66T,C70G; C2_,^{∧}A66,^{∧}C79; ^{∧}TA76,A88C; |
| | TG3GA,CG6GA,AG29TC,CA32TC; ^{∧}C80,A80G; G79C; C67G,^{∧}G77; |
| | ^{∧}C66,G79A; G7A,T16C,^{∧}T68; G7C,T9C,G17C,G75C; C2_,^{∧}T58; ^{∧}A65,^{∧}C80; |
| | A1G,-C.68.GA; G17C,T65G; TG3CC,C6T,C8G,GAG28ACA,CA32GG; |
| | T72C,G75A; C64G,A80T; G7A,C66T; C66G,^{∧}C79; C15A,G17A; ^{∧}AG66,A88C; |
| | A36_; G79T; T9C,G17C,^{∧}T58; T10G,A29T; ^{∧}G69,^{∧}C76; ^{∧}A69,A76_; |
| | G7A,A29G; A53_; T65G,^{∧}A80; C70A,C73A; T59C,G74T; C67A; G54T,^{∧}G56; |
| | ^{∧}G66; C2_,A29C; C38_,G54_; T3_,C6T,^{∧}C8,^{∧}G28,G30A,A33_; |
| | -TG.3.ACC,C6A,C8_,^{∧}CTC28,A29G,CCA31_; T9C,T14A; C64_; T14G,G54A; |
| | T71C,C73G,A83C; T9C,G17C; A53G,G54T; C66A,A80G; ^{∧}G63,^{∧}G81; ^{∧}G1; |
| | ^{∧}C78,^{∧}C78 |
| 2.3 to 2.4 | G7A,T9C; ^{∧}T67,^{∧}G67; C2_,C67T; A80_; ^{∧}G1,A13C; ^{∧}G66,G79C; T69A,A76T; |
| | T9C,T14C; A76G,G78C; T16G,G17T; T69C,G77A; T65_,A80G; |
| | G7C,T14C,T34G; C66T,C67T; A53G,-A.80.TC; C67T,G77C; C73A,G74T; |
| | A36G,C68G; T9C,G17C,^{∧}C78; TGG3GCT,C8G,^{∧}AC28,CA32_; ^{∧}T18; |
| | ^{∧}C29,^{∧}T29; ^{∧}GGGCG63,C68T,TTCGGA71_,^{∧}CCGCC82; |
| | T9C,G17C,C66T,A80G; ^{∧}A67,^{∧}G67; C2_,G79T; |
| | T3A,CGC6GAT,GAG28ATC,A33T; C2_,A21G,G79C; C2_,A21G; C64T,G77A; |
| | C8A,G79C; C67G,^{∧}A78,A80C; T69C,^{∧}A70; G74T,G75C; ^{∧}T76,A76G; |
| | A76T,A80G; ^{∧}C64; ^{∧}C29,C50T; |
| | ^{∧}AGCTTA65,^{∧}ATTG68,T69A,T72C,G77T,GA--.79.AGCT; A29T,G30A; |
| | T65C,A80C; ^{∧}C76,^{∧}T76; T9C; ^{∧}G67,G79_; C68T,G79T; |
| | ^{∧}CTCA3,GCGC5_,^{∧}CAT28,CCA31_; ^{∧}GA70,A88C; -T.3.AC,GC.7.A-, |
| | GAG28TGC,CA32GG; A21G; ^{∧}G69,T69C; G7A,^{∧}C66,^{∧}G74; ^{∧}T65,^{∧}A79; |
| | T65G; G74A,A76C; G74T,G75A; ^{∧}G68,G77T; T9G,G79T; ^{∧}AG67,A88C; ^{∧}C81; |
| | ^{∧}A67,G78T; C37A,G57T; G54C,G79T; G75T,G77A; G40A,TAG52CCT; ^{∧}G15; |
| | C67A,C68A; A36T,^{∧}C55; A36T,T59A,T65C; C67T,^{∧}G68; T71C,A76C; |
| | G7C,A29G,T65A; ^{∧}A78; T69C,G75T; ^{∧}TC66,A88C; CT2_,T59A; |
| | T9C,G17C,T65G; C70G,G75T; C2_,C73T,G75A; |
| | TG3CC,C6G,C8T,G28A,G30C,CA32GG; C64G,C66T; T11C,A29C; |
| | T9C,^{∧}G15,G17C,T65C; T69G,G74T; ^{∧}GA65,A88C; G7C,A61G; ^{∧}T65,^{∧}A80; |
| | C68_,^{∧}C79; G7A,^{∧}T29,G79T; A27T; A1_,T9G,T59C; T14G,-G.79.TT; |
| | T14C,T16A; C70A,G74T; T65A,G78A; ^{∧}T65,^{∧}G77; T9C,G17C,^{∧}G68,G77C; |
| | C66A,^{∧}A79; G7T,T9C,G17C; ^{∧}G69,A76T; C2_,A21C; ^{∧}T29,A29T; ^{∧}G69,^{∧}T69; |
| | C6T,T10C,T84G; T65C,C67T; C15T; G78C; G7T,A27G,C44T; ^{∧}C68,^{∧}A68; |
| | A1G,T9C,G17C,A76G; A36T,T59A; T14A,T16A; ^{∧}C66,G79_; |
| | -T.3.AA,G7_,AG29GC,CA32TG; C8G,^{∧}A70,^{∧}T75; C66A; ^{∧}C64,A80_; T69C; |
| | T71G,A76T; CT68TC,G74A; G54C,C68T; T9C,G17C,G81T; C2_,A13G; |
| | T65A,^{∧}C81; ^{∧}C66,^{∧}A78; ^{∧}C70,^{∧}A75; ^{∧}T68,G77T; A29T,C50T,A53G,G79T; |
| | C68T,A76T; T16C,A18T,A80C; ^{∧}TGGAAGAT63, |
| | C---.66.TCGG,C68A,GGAGGGAG74_,^{∧}A83,A86C; |
| | -T.3.AA,G7_,AG29GC,CA32TT; T9G,A29G; C68A; A27C,A29T; A36T,G54C; |
| | ^{∧}A4; ^{∧}A73 |
| 2.2 to 2.3 | ^{∧}C66,A76_; ^{∧}G65; ^{∧}T1,T59C; A36T; T3C,GCG5CGA,AGC29TCG,A33G; |
| | T9C,TG16GC,C68T,G79A; G7A,T14A,G17A,T34A; T65G,G79T; |
| | G7C,TC14CT,G17A,T34A; T3C,C67A; G77C,G78T; C2T,^{∧}G56; C6T,A83G; |
| | G7T,C8A; C66G,G79_; TG3_,C--.8.TCG,^{∧}C28,^{∧}C30,CA32_; C67T,T69G; |
| | CT2_,T9C; G78T,G79A; C2_,T9C,C15A,G17C; T9C,G17C,^{∧}TG67; |
| | G75T,A76C; ^{∧}C76; G79A,A80T; TT71GG,G74C; C70_,G75C; ^{∧}G66,G79T; |
| | T34A,A60G; A29T,C64T,C66A; ^{∧}CT29,A88C; ^{∧}G69; A53C,G79T; ^{∧}T80,A80G; |
| | ^{∧}G67,C67A; C67A,G78C; T9C,G17C,C70T,T72A; -T.3.AC,GC.7.A-,A29_, |
| | A-.33.GT; C2G,^{∧}T58; A27G,^{∧}A70; A39G,G78C; -G.78.AA,A80C; C66G,C67A; |
| | ^{∧}G68,^{∧}A68; T69C,T71A; G7T,G40C,AG53GA; T9C,G17C,G79T; C8A,C66T; |
| | G74T,A80C; G7C,T14G; ^{∧}C77,G77T; G58T,G79C; T14C; ^{∧}T65,^{∧}A80,A88C; |
| | C68A,^{∧}C77; GC--.63.ATTA,CCC66ATT,G--GG.77.AATAT,GC81AT; |
| | T11G,A29T; T14A,T16G; T71C,G75A; ^{∧}T67,^{∧}C78; T65C,G81A; G79C,A80T; |
| | ^{∧}C66,^{∧}G74; A53C,G54A; ^{∧}C66,^{∧}C79,A88C; G79C,A80G; |
| | T9C,G17C,^{∧}C66,^{∧}G74,A88C; C2_,T16C; T69G; ^{∧}G68,^{∧}A76,A88C; |
| | T71A,G74C; G74T; G7T,C37A; ^{∧}CA68,A88C; ^{∧}T12,^{∧}G12; A29T,C64T,C70T; |
| | G7C,A29G; G7A,T14A; T69C,C70G; G79T,A80C; C2T,G54C; ^{∧}T58; |
| | G7T,G30A,G81T; A29C,A83G; C2_,T69C; T3C,G5C,G7C,A29G,C31G,A33G; |
| | T72G; C64A; T34G,T59C; A1G,A60C; T65A,G79A; A27T,^{∧}C29; ^{∧}G67,^{∧}G77; |
| | ^{∧}G68,C68A; C64G; C66T,G77A; ^{∧}C64,^{∧}A80; C2_,C73T; A29G; ^{∧}T7; |
| | A1_,A46C,T59C; T9C,G17C,A76T; G78C,A80G; ^{∧}C66,A76C; ^{∧}T29,^{∧}T29; |
| | A27T,CT68TC,G74A; G75C,A76C; ^{∧}TT81,A88C; ^{∧}G77,A80G; ^{∧}C5,G7T; |
| | ^{∧}C66,T69C; C15A,T16A; C73T; ^{∧}A65,^{∧}A80; ^{∧}T65,G79_; G40A,T52C; |
| | G7T,A60T; TG3GA,GC7CA,A29G,CA32TC; ^{∧}TA70,A88C; ^{∧}C66,^{∧}A66; ^{∧}G67; |
| | A36C,^{∧}T55,C68T; T65_; G63_,C82_; C2A,A29G |
| 2.1 to 2.2 | A83G; G75_; C68_,G79_; C2_,A46C; ^{∧}C4; ^{∧}A69,^{∧}A69; G42A,C50T; |
| | A53G,^{∧}T55; A36G,^{∧}C58; TG3AC,C8A,GA28TC,CA32GG,T59C,C66A; |
| | C2_,A46C,C66T; C64T,G81T; ^{∧}A68,G77T; ^{∧}T80,A80T; T25G,A29T; |
| | G4A,C32T,G54_; ^{∧}T68; A76C,G78A; T9C,T14C,G17C; CT2_,A33C; |
| | ^{∧}CA65,A88C; A60C; ^{∧}A69,^{∧}T69; T9C,G17C,-T.65.GC; A18C,A61G,A80C; |
| | CT15TG,A21C; T72G,A76T; G7C,A29C; ^{∧}G79,^{∧}C79; T69G,^{∧}T76; C70A,G74C; |
| | T9G,A29C; C2_,G54A; C15G,T72A,G74A; ^{∧}A75; |
| | T3_,C6T,^{∧}C8,A29_,C32A,^{∧}C34; ^{∧}C29,A80C; G74A,A76T; C68T,T69C; |
| | T3_,C64T; A80T; CT2_,T9A; ^{∧}C29,A36C; ^{∧}GA67,A88C; T9C,G17C,T59A; |
| | A60T,C64T; T65A,G79T; A29C,T65C; ^{∧}T7,A13C; C8A,C82T; A76G,^{∧}C77; |
| | T3G,GC7CT,GA28AG,CA32AC; ---TT.71.AAGAA,G75_; G7T,C15G; |
| | ^{∧}C79,^{∧}C79; TG3GA,CG6AC,A29G,CA32TC,C68T,T72C; T72C; G63C,C82T; |
| | ^{∧}TG56,G57T; T14C,A29T,A36T; ^{∧}T68,^{∧}T68; T69G,T71G; ^{∧}G66,C66T; |
| | ^{∧}G68,G77A; G54C,G79A; G7T,C67G; C66G,G78A; A60C,A76G,A80G; G40A, |
| | -A.76.CC; C2T,C67A,^{∧}T78; T9C,G17C,G77A,G79T; G77T,G78A; ^{∧}T78,^{∧}C78; |
| | ^{∧}T68,G77C; ^{∧}A67,^{∧}G77; C73T,G75A; A29T,C66A,G74T; C2G,A36G; |
| | T3G,G5A,GC7CA,A29G,C31T,A33C; T69A,T71C; ^{∧}CG2,G5_,C8_, |
| | --G.28.CGC,CA32_; ^{∧}GT79,A88C; C68A,G77T; C64T; G40A,G77C; |
| | C68G,C70G; C2T,G78A; T9C,G17C,^{∧}C66,A76C; G7T,A29G,C82T; |
| | C2_,T65G,A80G; TGG3GCT,C8G,^{∧}CC28,CC31_; A29G,T69C,A80G; |
| | T34A,A36_; T9C,G17C,A27G; C15T,T16C; G7T,T9C,G17C,G40A,TA52AT; |
| | A36G,T71A; C6T; ^{∧}G69,A76_; C66A,G79A; ^{∧}C68,^{∧}T68; A21T,C67A; |
| | A21C,T72G,G77T; T71G,A76G; C2T,G54A; T71G,G77A; |
| | T9C,G17C,A29G,G81A; G7A,A36T,G54C,C68T; T3A,T59A; ^{∧}G70; ^{∧}T77; |
| | ^{∧}T68,^{∧}C77,A88C; TC14GT,T72C; T9C,G17C,T72_; ^{∧}C73; G7C,T14C; |
| | A36T,^{∧}T58; G54T; T59C; A29C,C50T,A60T; G54A,C70G,^{∧}T75; ^{∧}C66,G77C; |
| | C15G,G17C; C64G,^{∧}C81; T3A,G5C,GC7AG,GA28CT,C31G,A33G; |
| | A29C,C32A; ^{∧}G28; A21G,A53G; G75A,A76T; G7C,TC14CT,G17C,T34A; |
| | G28A |

*mutated sequences are ‘;’-separated and multiple mutations per sequence are ‘,’-separated

TABLE 20
Guide 175 mutations and resulting relative enrichment

| Log₂ | |
|---|---|
| enrichment | Mutations on scaffold 175* (SEQ ID NO: 2239) |
| 3.2 to 3.5 | C73A,^{∧}T78; C6T,A29C,G71C,^{∧}G80 |
| 3.1 to 3.2 | C17G,A87C; T3G,CGC6ACT,GAG28AGT,A33C; G7T,C9T,C17G,CG81GA; |
| | T16G,A29C; C9T,C17G,C65A,A87G |
| 3.0 to 3.1 | A68T,T83G; A27G,T92C; TGG3ATC,GC7AG,GA28CT,CCA31GAT; |
| | ^{∧}C65,A87G; G7T,A29T; T3G,GC7AA,GA28TT,A33C; C9T,C17G,C65_; |
| | G7T,T14G; ^{∧}G54,G78T; C9T,C17G,^{∧}A80; TC16AT,G64C |
| 2.9 to 3.0 | C15T,T34A; C9T,C17G,A88T; G7A,C15G; ^{∧}C76,^{∧}G76; CT2_,C15_,T58A; |
| | C2_,C15G; C9T,A29C; C9T,C17G,A85T,A88T; C9T,C17G,^{∧}CA63; G7T,C9G; |
| | A87T,A88C; C73G,G78A; A29T,A91G; TG3GA,G7A,A29G,CA32TC; |
| | ^{∧}G14,A29T,A87G; C9T,C17G,T74C; C2_,^{∧}A53 |
| 2.8 to 2.9 | C9T,A33T; G7T,T67G,G82C; ^{∧}T5,C9_,GAGC28CGCA; G7T,^{∧}A68,^{∧}A82; |
| | G7T,^{∧}C60; T14G,A29C; A29T,T66A; T3A,CG6TC,AG29GA,A33T; |
| | C2T,TC75AT; ^{∧}CG76,A88C; G7T,T14A,T83_; |
| | -T.3.GA,C6T,C9_,G28C,G30C,CA32TC; CT2_,C15T; TG3_,^{∧}GT8,G30C,C32G; |
| | T14_,A29C; C9G,C17G,A29C,T79G; |
| | TG3AC,G7C,A29G,CA32GT,G86C,A88C; T3A,GC7CA,A29G,A33T; |
| | G7C,C80A |
| 2.7 to 2.8 | G7T,A91C; ^{∧}C2,G4C,G7_,A29_,C32G,^{∧}G34; CT2_,A88C; C65G,A88C; G7T, |
| | -T.79.AA; A29C; T3A,GC7CA,A29G; C8G,A29C,A88_; A29T; C2_,A29C; |
| | A29C,C31T,A33G; T14G,C15T; C9T,C15A; ^{∧}GA1,G7A,C15A,C17G; |
| | C15A,T16A; CT2_,A29C; C9T,C17G,G78_; C9T,C17G,G-.78.AT; C73T,C76G |
| 2.6 to 2.7 | C9T,C17G,C65_,^{∧}A84; C9T,C17G,G70T,C81A; T74A,T79A; |
| | T3C,C6T,AG29CA,A33G; G7A,^{∧}T29; C76G,G77C; GG77CA,A87G; |
| | T16G,A29T; T3A,G5A,A29C,C31T,A33G; C9T,C17G,^{∧}AA53; |
| | TG3CA,GC7AA,GA28TT,CA32TG; G7A,A29C; T3G,G7T; CT2_,A68G; |
| | T14_,A29T; C2_,C9T,C17G; ^{∧}G3,GC.7.-T,G28_,^{∧}C34; G7T,^{∧}T92; |
| | G7T,^{∧}G69,G82T; |
| | ^{∧}GGCAGATCTGA64,T66C,A68C,GA71AG,^{∧}C75,G77T,T79C,CGTAAGAA81_; |
| | T3A,C6G,AG29CC,A33T; C80T,^{∧}A81; C81T; CT2_,C17A; C15A,T16G; |
| | C2_,T16G; G71_,C80T; TG3AC,GC7AG,GA28CT,CA32GG; |
| | T3A,G5C,G7T,C31G,A33T; T3G,G7T,C9T,C17G; G64T,A85T; G7C,T14_; |
| | C9T,A29T; G7T,^{∧}G14; A88G,^{∧}C89; CT2_,A33T; C81T,^{∧}A82; |
| | C9T,C17G,A29C,C32A; C9T,C17G,^{∧}GA77 |
| 2.5 to 2.6 | G7C,C15G; C9T,C17G,TC75GT; TG3CA,CG6GA,AG29TC,CA32GG; G7T; |
| | T14A,T16G; G7T,C9T,G71_,^{∧}T79; C15A; CT2_,A33T,C73_; C2A,C9T,C17G; |
| | CGC6TCA,GAG28TGA; C15G,A29C; C2_,T16G,A91C; ^{∧}T81,C81T; |
| | TG3AA,A29C,CA32TG; G4A,G7T,C32T; T3C,CGC6GCT,GAG28AGC,A33G; |
| | T3A,G7A,A29T,A33G; -G.4.CC,G7_,AGCC29GCGG; C65T,G86_; C9T,^{∧}A16; |
| | A36G,^{∧}C57; A1_,T16G; C6T,G7T; ^{∧}G14,A29T; ^{∧}AT16,A88C; C8G,A29C; |
| | ^{∧}G64,A87C; ^{∧}G70,^{∧}T79; T16A,^{∧}C29; |
| | TG3GA,C6G,C8T,GAG28ACC,CA32TC,G71T; G7T,A29C; |
| | T3G,GCG5AGT,GC30CT,A33C; ^{∧}C2,^{∧}T14,A29T; C9T,C17G,A88_; C9T,T16A |
| 2.4 to 2.5 | TGG3ACA,A29C,CCA31TGT; T3_,G5A,G7C,^{∧}G9,^{∧}C28,A29G,C31T,A33_; |
| | C15A,A29T; G64A,^{∧}T65; CT2_,A27G; ^{∧}A16,^{∧}T16; G7T,C15A; |
| | G7T,C9T,C17G; C2G,A29T,T66A; TG3GA,CGC6TTA,G28T,G30A,CA32TC; |
| | A1C,G82C; A27C,A29C; C9T,C17G,^{∧}GA71; T3C,^{∧}T6,CC.8.T-, |
| | C17G,GAG28AGA,A33G,^{∧}G54; ^{∧}T16,A27T,A29C; G64C,^{∧}A87; ^{∧}C14,A29C; |
| | ^{∧}A65,^{∧}T65; C2T,C9T,C17G; C9T,C17A; G70A,C81A; C2G,A36T; |
| | G5C,C8G,GA28CC,CC31GA; C6T,A29C; C80T,^{∧}G81; |
| | T-.3.CA,G7_,AG29GC,CA32TG; ^{∧}C78,G78A; G7A,T14_,CT65TC; |
| | -T.3.AA,G7_,AG29GC,CA32TG; ^{∧}C29,A29T; G7A,A29T; |
| | TG3GA,GC7CA,A29G,CA32TC; ^{∧}T64,G64A; C15A,A29C; T75A,G77T; |
| | ^{∧}A3,^{∧}T3; A27T,A29C; T14A,A29C; T74C,G77A; G7C,A29G; C9T,C17_; |
| | G5A,G7A,A29T,C31T; ^{∧}C63,^{∧}A63; G7T,A91G |
| 2.3 to 2.4 | CT2_,G64T,T66G; G28T,A29C; T3G,G5T,GC7CG,GA28CG,C31A; |
| | TG3AC,G7C,A29G,CA32GT; C9T,C15A,C17G,A29C,^{∧}TG55,G57A; |
| | ^{∧}C14,A29T; C9T,C17G,GC64TG; G7A,^{∧}T29,A36C; ^{∧}T16,^{∧}G54; |
| | TG3CA,C8A,GA28TC,CA32GG; G7T,C9T,C69G; C9T,C17G,^{∧}A70; |
| | A72_,T79G; T3A,G5T,C8T,GA28AC,C31A,A33T; C9T,C17G,A29C; ^{∧}G54; |
| | G7A,TC14CT,C17A; C9T,C17G; ^{∧}G70,^{∧}T79,A88C; ^{∧}A64,^{∧}G64; T14G,A29T; |
| | C9T,T16_; ^{∧}A14,^{∧}T14; ^{∧}AC1,GCG.5.--T,GC30_,^{∧}GT34; A29C,A91G; |
| | C2_,T14A; C9T,^{∧}A17; C9T,C17G,G78A; T3G,G5A,A29C,C31T,A33C; |
| | C9T,^{∧}G17; G7T,A29G; TG3GA,C6G,C8T,GAG28ACC,CA32TC; |
| | ^{∧}T1,CG6TC,C9T,C17G; C17A; ^{∧}T17,^{∧}A17; |
| | T3A,G5C,GC7AG,GA28CT,C31G,A33G; ^{∧}GC72,A88C; T3G,G7T,A33C; |
| | TG3CA,CG6GA,AG29TC,CA32TG; T3G,G5C,C8G,GA28CC,C31G,A33C; |
| | ^{∧}T3,C80G; C9T,C17G,T45G,^{∧}G54; C9T,C17G,A72C,T74G; |
| | G5C,C8G,GA28AC,C31G; A29T,G56T; G7T,C63A |
| 2.2 to 2.3 | A36T,A85C,A87T; T14A,C17G; C9T,C17G,^{∧}G54; |
| | G4C,C8G,GA28AC,C32G,A87G; ^{∧}T72; A85C,A87C; G7T,T92C; |
| | C9T,C17G,^{∧}C63; TG3AA,C6T,AG29CA,CA32TT; C9T,C17G,A85G,A88G; |
| | G64C,^{∧}G88; G7A,^{∧}T29,A68C; ^{∧}A13,T14C; C9T,C17G,^{∧}G54,A85C,A88C; |
| | -GG.4.CAT,C9_,GAGCC28CGATG; TG3AC,C6A,AG29CT,CA32GG; |
| | C9T,^{∧}C63; C9T,A88C; A27T,A29T; C9T,C17G,^{∧}G54,A91C; G86A,A88T; |
| | TG3CA,GC7AA,GA28TT,CA32TG,C69T; T74G,G77T; |
| | TGG3ACA,C8G,GA28CC,CCA31TGG; G7A,C17A,^{∧}G81; G7T,A59G; |
| | ^{∧}A65,^{∧}G86; C73T,G78T; ^{∧}C72,^{∧}T79; A1G,C9T,C17G; ^{∧}G1,C9T,C17G; |
| | ^{∧}G72,^{∧}C72; C2_,A29T; ^{∧}T14,A29T; ^{∧}G64,^{∧}T87; ^{∧}A65; ^{∧}C18,^{∧}T18; ^{∧}G64, |
| | A88C; C9A,A29C,G57T; G7C,^{∧}G28; G77A; G7A,TC14CT,C17G; C2_; |
| | G7C,T14A,^{∧}T86; C9T,C17G,A53G; T3G,GC7CT,GA28AG,G86T; |
| | C9T,C17G,A29C,A91G; C9T,T16_,A91C; CT2_,^{∧}G64,C65A; C15_; |
| | T16G,C17T; G7T,G28A |
| 2.1 to 2.2 | C9T,C17G,A29T; A87C; ^{∧}CT18,A88C; C9T,C17G,^{∧}G64; C17G; C15T; |
| | ^{∧}T16,T79C; ^{∧}A64,G64A; A1C,T3G,C9T,C17G; GA28CC,^{∧}T65; C15A,C17A; |
| | G78C,T79G; A29C,T58G; C2,G7A,-C.65.AA; CT2_,A29T; T3A,A33T; |
| | G4A,CGC6GTA,G28T,G30C,C32T,T67_; C9T,C17G,C65_,A91C; ^{∧}T65,A87G; |
| | A88_; G7T,C9A; C9T,C17G,C65A; TG3GC,C6T,AG29CA,C32G; G7T,T16A; |
| | G7T,G70C,C80A; G7T,T14A; TG3AA,GC7CG,GA28CG,CA32TG; ^{∧}G54,A91C; |
| | C73_,G78_; T3C,GC5TG,C8T,GA26_,G30A,^{∧}CG34; ^{∧}CT3,A29C; C2T,T14G; |
| | G7C,A29T; C9T,TC16GG; T3G,C8T,GA28AC,A33C; ^{∧}G16,^{∧}T16; |
| | C9T,C17G,A36C; TGG3AAC,C8G,GAG28_,A---.33.GGGT; C9T,C17G,A87G; |
| | ^{∧}T72,T79G; ^{∧}G17,C17T; CT2_,A39C,A88C; T3G,A33C; T3_,A33G; |
| | C-.2.TG,TC75CA; G7C,C9T,C17G,^{∧}G92; C9T,C17G,G82C; C9A,A29C; |
| | C2_,C9T,C17G,A91C; C2_,A29C,A91C; CT2_,C9T,C17G; G7T,A60G; |
| | ^{∧}C71,^{∧}T71; C2_,G77T,A91C; C2_,A29G; ^{∧}T71,C80G; T3A,G7A,A29G,A33T; |
| | C9T,A29G |
| 2.0 to 2.1 | C65T,^{∧}A66; CT2_,C15_,T58A,A72C; C9T,C17G,C73A,C76A; C2_,A91C; |
| | C80T; T3A,G7C,C9T,C17G; ^{∧}C63,^{∧}G88; G7T,A61T; |
| | GC62_,C65G,T67G,A72T,T79A,AAGA.84.---C,G89C; T3G,C9T; T16A,C17A; |
| | C6T,A29T; T3C,GC5CG,C8T,GAGC28ACCG,A33G; G7A,C15T; ^{∧}T2; C15G; |
| | C9G,A29T; C15T,A29T; G7T,^{∧}C14; ^{∧}A64,A88T; A29C,G30A; |
| | C2_,A29C,A46C; C9T,C17G,A72T,G78A; ^{∧}A87,^{∧}T87; C9T,A59C; |
| | TG3AC,C8A,GA28TC,CA32GG; C9T,C17G,^{∧}G64,^{∧}G88; A29C,G71A,C80T; |
| | T3C,A29T,AC68TA; ^{∧}A17; C9T,C17G,G64T,T66C; G7A,T16G; |
| | C17T,C65G,G86C; C69T,G82C; A1T,C2A; T14A,^{∧}C29; ^{∧}A15,C15T; |
| | G7T,T16G; T3A,GC7CA,GA28TG,A33G; ^{∧}T81; T16C,A29C; A29C,A91C; |
| | G71A,A88T; ^{∧}C65,A87G,A91C; C9T,C17G,A29T,^{∧}A53; G71T; ^{∧}A80,^{∧}A80; |
| | C9T,C17G,A36G; C9T,C17G,T--.54.CTG; T16A,A29T; ^{∧}G77,T79C; |
| | C9T,C17G,G64C; TG3AC,CG6GA,AG29TC,CA32GG; A36T,C37T; |
| | A29C,^{∧}C65,A85_; C15G,A29T; ^{∧}A70,C81T; A29T,A33G; C73A,C80T; |
| | C9T,C17G,G82_; C9T; C69T,A84G; C2_,C9T,C17G,A46C |
| 1.9 to 2.0 | C2_,A29G,A91C; A68G,T83C; C9T,T14A,C17A,^{∧}AG85; ^{∧}T66,^{∧}G85; |
| | G62T,CT65_,C69A,G71A,C80T,G82T,A85C,AGC88_; T3_,G5T,^{∧}A8, |
| | -A.29.TC,C31A,A33_; G7A,T14C,C17A; T3G,CG6TC,AG29GA; ^{∧}T54; ^{∧}C8,^{∧}T8; |
| | G7T,AA87TG; A72C,C73A; C2_,C6T; ^{∧}C29; G71C,C81_; |
| | C9T,C17G,G64_,A88_; C2_,A88T; T3G,G5C,GC7TG,G28C,C31G; |
| | C9T,C15T,C17G,A36C; G7T,T34G; T14A; ^{∧}T73,^{∧}C78; ^{∧}G64; ^{∧}G15,C15T; |
| | A36C,^{∧}A57; A-.72.GC,^{∧}T79; T16A,A29C,^{∧}A58; C9T,C17G,^{∧}T52; C2_,A85T; |
| | ^{∧}C29,A29G; G7T,T14C; C2A,^{∧}T57; G7T,C15G,T34G; T14G,C17T; T14C,C15T; |
| | T3G,G5A,GC7TA,G28T,C31T,A33C; ^{∧}C71,^{∧}T79; ^{∧}T14,A29C; ^{∧}A1,A36C; |
| | ^{∧}C63,^{∧}G89; G7C,A91G; T14C,A29C; C9T,C17G,G78T,C80T; ^{∧}G69,G82C; |
| | TGG3GCA,G7T,CCA31TGC; C6T,A29C,G71C,^{∧}G80,A91C; A13C,A29C; |
| | ^{∧}C63,A88T; G7T,T14_; C2_,GG77AA; C9T,C17G,T58A; C2_,G77T; C2_,T3_; |
| | C9T,C17G,^{∧}AA53,A88C; G7T,C9T; G7A; CG6GC,AG29GC,C32A; |
| | C63T,TTA66GCC,GA71_,TC79_,TAA83GGC,A87C,G89_; G7C,C17G; |
| | C2_,A46C; C9G,A29T,C37T,^{∧}A56 |
| 1.8 to 1.9 | ^{∧}G69,A72C,G82C; ^{∧}G70,T79G; G7A,C15A; ^{∧}T36,^{∧}A57; ^{∧}G70,^{∧}C79; |
| | TGGCG3CACAT,GCCA30TGTG; G71A; TG3AC,C8A,A29C,CA32GT; |
| | T10G,A29C; ^{∧}A65,G77A,^{∧}G86; C9T,C17G,A88_,A91C; ^{∧}C78,^{∧}A78; |
| | G7T,C90T; T3G,G5A,GC7TG,G28C,C31T,A33C; G7T,C9G,G86T; |
| | A29C,C31T,A33C; A29C,G70A; A-.88.GC,A91C; ^{∧}A17,A36C; |
| | T3C,GCG5TGA,AGC29TCA,A33G; T3C,CGC6GCT,GAG28AGA,A33G,A88C; |
| | C35G,^{∧}C58; T74A,G78C; C9T,CA17GT; G7A,C17G; C9T,C17G,^{∧}GT70; |
| | CTG2_,A29C; C2_,A68G; ^{∧}T64,^{∧}T88; T3G,A33T; C2_,T16G,A29C; ^{∧}A1; |
| | A36T,^{∧}G55; C9T,C17G,C63A; C9T,A18G; C2T,A36T; ^{∧}A81,^{∧}A81; |
| | C9T,T14G,C17G; -A.72.CC,A91C; A29T,T79G; G7A,A29T,A59G; G7C,^{∧}C78; |
| | ^{∧}AG64,A88C; CT2_,C9T,C17G,C69T; C2_,A46C,A91C; ^{∧}C89,A91C; |
| | ^{∧}C29,A68C; C2_,G64T; -C.15.GT,A27C; CT2_,T10G,A88C; T14C,A29T; |
| | C9T,C17G,C76T; A84G,A87C; G7C,C9T,T14A,C17G,T34A; G70T,C81A; |
| | T14G; ^{∧}T3,A29T; G7T,^{∧}T29; A29T,C65A,T67G; G64C,A87G; |
| | C9T,T14A,C17G; ^{∧}T57,A87G; TGG3ATC,A29C,CCA31GAT |
| 1.7 to 1.8 | C2_,G70A; C9T,C17G,^{∧}GA77,A88C; C9G,C17G,A29C; ^{∧}T70,^{∧}T81; |
| | G7C,C9T,C17G; T3G,CGC6TTG,G28C,G30A,A33C; ^{∧}A16,A68T; |
| | C9T,C17G,T67C; G7T,^{∧}C14,A33C; G7A,T14_; ^{∧}C14,^{∧}T14; |
| | C9T,C17G,GG77TT; C2T,C80T; ^{∧}T64,A88_; ^{∧}G54,A68C; G7T,CT9AG; |
| | C9T,C17G,T79G; T79G,C80T; ^{∧}AT3,A88C; ^{∧}AG54,A88C; C2G,A33C; |
| | C2_,A88T,A91C; C9T,C17G,T58C; C2_,C73T; |
| | TGG3CCC,C8G,GA28CC,CCA31GGG; G7T,T10G; C9T,C17G,^{∧}A80,A91C; |
| | ^{∧}T64; T14_,A29C,A91C; G7A,G28T,AAAGCGCTTA59_; G7T,G71_; |
| | ^{∧}A17,^{∧}A17; T14_,A29T,A91C; C17G,A72G,T74C; ^{∧}T88; CT2_,A94C; |
| | A27G,A29C; A85T,A87G; C9T,C17G,^{∧}AA79; |
| | C9T,T14A,C17G,T34A,^{∧}G64,G86T; C9T,C17G,T45G; C2_,C9T,C17G,C65T; |
| | ^{∧}G3,G5C,C9_,GA28CG,C32A; T74G,G78T; TG3_,--C.8.GCT,G28_,^{∧}G33; |
| | A39T,T54A; C2_,A72G; C9T,C15T,C17G; TG3CA,CG6GA,AG29GC,CA32TG; |
| | G64C,A88G; C15A,C17G; C2_,C65A; ^{∧}G64,G86A; ^{∧}C29,A36C; G64T,T66A; |
| | TG3GT,A29C,C32A; ^{∧}A64; C81G; C9T,A72T,T79C; C9T,C17G,G77T |
| 1.6 to 1.7 | A72G; ^{∧}C14,A29C,A36C; T3C,C9T,C17G; G4C,C8G,GA28AC,C32G; |
| | C2_,G71C,^{∧}G80; C76T; C9T,T14A; C2G,C9T,C17G; G70T,C81G; C17G,^{∧}T54; |
| | A72C; C2_,C9G,C17G; TG3GC,C8T,GA28AC,C32G; |
| | TGG3GCT,C8G,^{∧}CC28,CC31_; C9T,C17G,A39T,A-.53.GC; ^{∧}T16; T67C,A87C; |
| | ^{∧}G81,C81T; C76G,G78C; A1C,G56A; TG3CA,GC7AG,GA28CT,CA32GG; |
| | C9T,C17G,C65G,^{∧}A87; G86A,A88C; G7T,C9T,C17G,^{∧}A72,G78A; ^{∧}G70,C80A; |
| | ^{∧}A17,A68C; C2_,C80G; ^{∧}C71,^{∧}T79,A88C; C9T,C17G,^{∧}T57; ^{∧}T2,C9T,C17G; |
| | T45G; G64C; T14_; C65T,G86A; C69T; ^{∧}C65; G64T,C65A; |
| | T3G,GC7CT,GA28AG; ^{∧}A1,^{∧}A53; T3A,G5C,GC7AT,GA28AT,C31G,A33T; |
| | C9T,C17G,^{∧}CA72; C9T,C17G,C73A,T79A; C2_,A53G; |
| | TGG3GTC,C8G,GA28CC,CC31GA; ^{∧}C5,G7T,C9T,C17G; G71T,C80T; |
| | C15T,T16G; G7C,C9T,C17G,C76A,G78T; G64T,T66C; ^{∧}C65,A91C; C73T; |
| | A72C,G78T; ^{∧}C63; A68G,C81T; ^{∧}GT87,A88C; C9T,C17G,^{∧}A78; |
| | T3A,GC5AG,C8T,GAGC28ACCT,A33T; ^{∧}A1,^{∧}T54; A29C,G56A; C2_,C80T; |
| | ^{∧}TA17,A88C; A72G,C73T; A29C,C31T,T83C; G7T,A27T; |
| | T3C,G7T,G40A,^{∧}T54; A88C; ; G64T,A87C; T3_,^{∧}T9,G28_,^{∧}G32; ^{∧}GT16,A88C; |
| | -T.3.AC,G7A,C9_,GAG28TGC,CA32GG,A84C,G86T; ^{∧}T65; C76A,G77T; |
| | ^{∧}G14,A29C; G64C,A88C; A72_,T79G,A91C; ^{∧}C29,A68C,A72C; |
| | TG3AT,GC7TT,G28A,CA32AT; C9T,C17G,T--.54.CTG,A88C; G7T,A59C; |
| | CC8GT,C17G; G7C,T14C,^{∧}T86; ^{∧}CA3,GC5_,C8G,GA26_,G30C,^{∧}TG34 |
| 1.5 to 1.6 | T3A,^{∧}A5,G7_,AGC29GCT,A33G; C9T,C17G,^{∧}C73,G78C; G71A,A72G; |
| | AG27TA,A88T; G7T,A91T; ^{∧}T57,A91C; ^{∧}T2,A68C; ^{∧}T2,A36C; G7T,T10C; |
| | ^{∧}A64,A88G; TG3CA,C6T,C8T,GAG28ACA,CA32TG; ^{∧}T54,A68C,A72C; |
| | G7T,A61G; GCGC5CAAG,GAGC28CTTG; C6T,CT9TC,C17G,A29C; |
| | ^{∧}CA63,A88C; C2_,C9T,C17G,A36C; ^{∧}G64,^{∧}G86; |
| | ^{∧}CGGCAGAT65,T67G,^{∧}GC69,G70T,A72G,^{∧}GCTC75,G77T,T79C,CGTAA81_; |
| | C73T,^{∧}G74; T14G,T16A; ^{∧}AT14,A88C; G64C,A88T; C2_,A39T,^{∧}A55; |
| | C2_,C15T; ^{∧}G70,C81T; ^{∧}A81,C81T; ^{∧}T72,A72T; C2_,C69T; T75G,T79G; |
| | A88_,A91C; ^{∧}T7,G7T; G7A,A29T,^{∧}A77; CC8AT,C17G; C2_,T52C; |
| | G7A,C9T,TC16CG; G70A; C9T,C17G,AA87TC; ^{∧}A53,A91C; |
| | T3A,G5C,GC7CT,GA28AG,C31G,A33T; ^{∧}G70,^{∧}C79,A88C; ^{∧}T72,^{∧}G77; |
| | C9T,C17G,C69T; T-.3.CA,G7A,C9_,AG29GC,CA32TG; |
| | TGG.3.-AA,^{∧}G9,^{∧}CGC28,A29T,CCA31_; GCGC.62.--AA, |
| | T67C,C69A,GA71AC,TC79GT,G82T,AAGA.84.---G,GC89TT; |
| | A85G,A87G; TG3_,C--.8.TCG,GAG28CGA,C32G; T66C,A85G; |
| | ^{∧}A16,G86T,A88T; TT74GG,G--.77.AAC; C2_,T79C; C9T,^{∧}A13,C17G,^{∧}G54; |
| | ^{∧}C63,G64T; C2_,T83C; ^{∧}C73,^{∧}C73; -T.3.AA,G7_,A29_,A-.33.GT,G70A; |
| | ^{∧}T16,A91C; ^{∧}T64,^{∧}G64; T79C; C9T,C17G,G77A; ^{∧}T64,^{∧}T64; C2_,G71A; |
| | T14C,C17G; G7C,TC14CA,C17G; A85C,A88C; |
| | ^{∧}A3,GG4TC,C9_,GA28CG,CCA31AAT; --C.63.TTT,C65_,CGGA.69.T---, |
| | TCCG.79.---A,G86C,G89A; C9T,C17G,^{∧}C57; C15G,T16A; C9T,C17G,^{∧}CA64; |
| | AG39TA,T52C,T54A; C2A,A87G |
| 1.4 to 1.5 | -C.15.GT,A36C; A29C,T83C; G7T,A27G; ^{∧}C29,^{∧}C29; ^{∧}T80,^{∧}C80; |
| | TGGC3ACAG,GA26_,--A.33.TGG; A72G,^{∧}T73; C9T,C17G,T66A,A85G; |
| | ^{∧}C15,^{∧}G15; TG3_,--C.8.GCT,GAG28CGC,C32G; ^{∧}T19; G28A,A29C; |
| | ^{∧}G70,^{∧}G80; CT2_,A36C,A39C; C9T,C17G,^{∧}CC79; ^{∧}G54,A68C,A72C; |
| | ^{∧}CT78,A88C; T74G,G78C; TTC74AGG,^{∧}AT78; C9T,C17G,C76G; |
| | ^{∧}GGCAGCTCTGA64,T66C,A68C,GA71AG,^{∧}C75,G77T,T79C,CGTAAGAA81_; |
| | ^{∧}A1,A68C; ^{∧}A4; A72G,G78C; T3G,C8T,GA28CC,A33C; G7C,-C.80.AT; |
| | C9T,C17G,A59T; G26C,C93G; G7C,T14A,^{∧}T86,A91C; ^{∧}G64,^{∧}T87,A88C; |
| | A1G,A29C; C9T,C17G,^{∧}AT78; G28T,GCCA30TTTG; C2_,T75A,G78A; |
| | TG3GA,CG6AC,AG29GT,CA32TC; A36G,^{∧}C57,A91C; ^{∧}C72,A72C; |
| | C9T,C17G,^{∧}G82; A27T; TG3CC,CGC6TTG,G28C,G30A,CA32GG,C80G; |
| | ^{∧}A1,^{∧}A53,A88C; A72C,C80A; G7T,C73G; ^{∧}A15,A87G; T14_,^{∧}C29; |
| | G7A,T14_,A91C; C15T,T16A; C15T,C17G; C65_,A88_,A94C; ^{∧}A16; |
| | C9T,C17G,^{∧}G54,A68C; -T.3.AC,G5A,C9_,GAG28CGT,CA32GG; ^{∧}T15,^{∧}C15; |
| | C9T,T14A,C17G,T34C,^{∧}G64,G86T; ^{∧}T71,C80G,A91C; -C.15.GT,A68C; |
| | ^{∧}G87,^{∧}T87; C73_,G78_,A94C; C2G; G77C,T79A; G70C; A68G; ^{∧}T81,A91C; |
| | C9T,C17G,T79A; ^{∧}T72,^{∧}T72 |
| 1.3 to 1.4 | T66A,A88C; C76G,G77T; A53G,A59C; CTG2_,G7T; A72_,^{∧}T79; |
| | ^{∧}AA80,A88C; TGG3CAA,C8G,GA28CC,CCA31TGG; ^{∧}C78,^{∧}T78; |
| | --G.28.TGA,T79C; ^{∧}T72,^{∧}G77,A88C; A72G,^{∧}C79; |
| | T3G,G5A,G7A,A29G,C31T,A33C; T14G,A21G; ^{∧}T2,A72C; G7T,T14G,^{∧}CG64; |
| | T3G,G71A; G64A,A87G; T3C,C6T,AG29CC,A33G; T45A; |
| | G7A,C9T,T14A,C17G; TG3CT,CGC6TAT,GAG28ATA,CA32AG; |
| | C9T,C17G,^{∧}T83; G7T,C9T,A53T; C9T,C17G,T75G; G7C,T14C,A72_; |
| | ^{∧}A65,A87G,^{∧}C89; C9T,C17G,G70C,C81G; G7T,A59T; AG29CA,A72T,^{∧}G77; |
| | T74C,G78A; C2A; C9T,C17G,C73T,T75G; ^{∧}G54,A72C; ^{∧}AA81,A88C; |
| | ^{∧}T54,A68C; C65A,G86A; ^{∧}A1,A72C; T3G,C9T,C17G; C2_,A33T; A87T; |
| | ^{∧}A65,^{∧}T86; A53G; A85G,A87C; T3G,G5C,GC7TG,G28C,C31G,TC75_; |
| | -T.3.AC,G7A,C9_,GAG28TGC,CA32GG,G71T; G7C,C15A; G64A,A85G,A88_; |
| | ^{∧}A74; ^{∧}TG64,A88C; A29C,A60T; C9T,C17G,C80G; ^{∧}T64,^{∧}A87; G7T,^{∧}A59; |
| | G77C,G78C; A72C,^{∧}T79; ^{∧}T73,^{∧}C78,A88C; ^{∧}C29,A91C; ^{∧}A64,A88C; |
| | ^{∧}G54,T58A; TGGCG3CACTT,GCCA30AGTG; C9T,C17G,A21T; |
| | G4C,C8G,GA28AC,C32G,^{∧}G82; A36C,A53G; C9T,C17G,G71T; |
| | C9T,CA17GT,T45A,G70C; ^{∧}A81; G7A,A72T; CT2_,T10G; G64T,A87G; |
| | ^{∧}G70,T79A; C2_,C9T,C17G,T52C; C2_,T45C; C9T,C17G,^{∧}C35,A36G; |
| | G7T,T58A; ^{∧}A73,^{∧}C73 |
| 1.2 to 1.3 | C2G,C73G; G7T,^{∧}T14; T75C,C76T; ^{∧}A80,^{∧}C80; A1_,A46C; C9T,C17_,A91C; |
| | C35G,^{∧}C58,A68C; C2T,T3A; ^{∧}C29,A72C; T79G,C80A; G71A,C81_; |
| | G7T,G28T; CT2_,T45G; A29C,^{∧}G92; C9T,C17G,T67C,A84G; |
| | T3C,^{∧}T6,C9_,GAG28AGA,A33G; A36T; A85C,A88T; |
| | TG3GC,C6A,C8T,GAG28ACT,CA32GC; T10C,A29C; A1_,C2_; ^{∧}C65,A87T; |
| | A72T,C81T; C15A,T79A; ^{∧}GA1,G7A,C15A,C17G,A88C; ^{∧}A16,T16A; |
| | A29T,A60C; C76A,G78A; A29T,C31T; A29C,G86C; ^{∧}G70,T79G,A91C; |
| | ^{∧}T54,A72C; ^{∧}GAAC73,T74A,GG.77.C-; T14_,A29C,A46C; |
| | C9T,C17G,^{∧}A72,^{∧}A78; T14C,C15A; ^{∧}A17,^{∧}G17; C9T,C17G,CG76AC; |
| | T74C,T79C; G7A,TC14AA,C17A; ^{∧}T64,^{∧}A64; ^{∧}T81,^{∧}A81; C2A,A36T; |
| | C9T,C17G,G82T; T74A,G77A; ^{∧}A1,A33C,A36C; G7C,TC14CT,T34A; |
| | A36T,A53G; ^{∧}A65,^{∧}A84; A1_; G7T,^{∧}T60; |
| | T3A,G5C,G7T,C31G,A33T,T52G,^{∧}C54; T75G,G77T; G5C,G7A,A29T,C31T; |
| | TGGC3CCAG,C8T,GA26_,G30A,--A.33.TGG; C9T,^{∧}C17; C2_,T14A,A91C; |
| | G77A,G78T; ^{∧}G64,G86A,A91C; T16A,C17G; C9T,C17G,T34A; A87G; A39G, |
| | -T.54.GC; A39G,-T.54.GC,A91C; ^{∧}A5,C6T,C9_,G28C,GC30CT; A72C,G77A; |
| | C2_,A91C,A94C; C2_,G7C; A84G; C73A,G78T; ^{∧}T78,^{∧}A78; |
| | TGG3GTC,C8G,GA28AC,CCA31GAC; G7A,^{∧}G14; C76T,G77A; C2_,G7T; |
| | G7A,T14A; ^{∧}A17,A68C,A72C; TGG3CCA,GC7CG,GA28CG,CCA31TGG; |
| | T79G; ^{∧}A72,^{∧}C78; C15G,A29T,G57C,A59T; T14A,^{∧}G74; G7T,C65T,A87C; |
| | C9T,C17G,G70T |

*mutated sequences are ‘;’-separated and multiple mutations per sequence are ‘,’-separated

### Example 14: The CcdB Selection Assay Identifies CasX Protein Variants with Improved dsDNA Cleavage or Improved Spacer Specificity at TTC, ATC, and CTC PAM Sequences

[1179] Experiments were conduected to identify the set of variants derived from CasX 515 (SEQ ID NO: 416) that are biochemically competent and that exhibit improved activity or improved spacer specificity compared to CasX 515 for double-stranded DNA (dsDNA) cleavage at target DNA sequences associated with a PAM sequence of either TTC or ATC or CTC. In order to accomplish this, first, a set of spacers was identified with survival above background levels in a CcdB selection experiment using CasX 515 and guide scaffold 174. Second, CcdB selections were performed with these spacers to determine the set of variants derived from CasX 515 that are biochemically competent for dsDNA cleavage at the canonical “wild-type” PAM sequence TTC. Third, CcdB selection experiments were performed to determine the set of variants of CasX 515 that enable improved dsDNA cleavage at either PAM sequences of type ATC or of type CTC. Fourth, plasmid counter-selection experiments were performed to determine the set of variants derived from CasX 515 that resulted in improved spacer specificity. Materials and Methods:

[1180] For CcdB selection experiments, 300 ng of plasmid DNA (p73) expressing the indicated CasX protein (or library) and sgRNA was electroporated into E. coli strain BW25113 harboring a plasmid expressing the CcdB toxic protein. After transformation, the culture was allowed to recover in glucose-rich media for 20 minutes at 37° C. with shaking, after which IPTG was added to a final concentration of 1 mM and the culture was further incubated for an additional 40 minutes. A recovered culture was then titered on LB agar plates (Teknova Cat #L9315) containing an antibiotic selective for the plasmid. Cells were titered on plates containing either glucose (CcdB toxin is not expressed) or arabinose (CcdB toxin is expressed), and the relative survival was calculated and plotted, as shown in FIG. 32. Next, a culture was electroporated and recovered as above, and a fraction of the recovery was saved for titering. The remainder of the recovered culture was split after the recovery period, and grown in media containing either glucose or arabinose, in order to collect samples of the pooled library either with no selection, or with strong selection, respectively. These cultures were harvested and the surviving plasmid pool was extracted using a Plasmid Miniprep Kit (QIAGEN) according to the manufacturer's instructions. The entire process was repeated for a total of three rounds of selection.

[1181] The final plasmid pool was isolated and a PCR amplification of the p73 plasmid was performed using primers specific for unique molecular identifier (UMI). These UMI sequences had been designed such that each specific UMI is associated with one and only one single mutation of the CasX 515 protein. Typical PCR conditions were used for the amplicationThe pool of variants of the CasX 515 contained many possible amino acid substitutions, as well as possible insertions, and single amino acid deletions in an approach termed Deep Mutational Evolution (DME). Amplified DNA product was purified with Ampure XP DNA cleanup kit, with elution in 30 μl of water. Amplicons were then prepared for sequencing with a second PCR to add adapter sequences compatible with next-generation sequencing (NGS) on either a MiSeq™ instrument or a NextSeq instrument (Illumina) according to the manufacturer's instructions. NGS of the prepared samples was performed. Returned raw data files were processed as follows: (1) the sequences were trimmed for quality and for adapter sequences; (2) the sequences from read 1 and read 2 were merged into a single insert sequence; and (3) each sequence was quantified for containing a UMI associated with a mutation relative to the reference sequence for CasX 515. Incidences of individual mutations relative to CasX 515 were counted. Mutation counts post-selection were divided by mutation counts pre-selection, and a pseudocount of ten was used to generate an “enrichment score”. The log base two (log 2) of this score was calculated and plotted as heat maps portrayed in FIGS. 33-36. Biological replicates for a single spacer are indicated, and the mean of these replicates was calculated and plotted as the overall enrichment score. For the experiment portrayed in FIG. 33, the library was passed through the CcdB selection with two TTC PAM spacers performed in triplicate (spacer 23.2 AGAGCGTGATATTACCCTGT, SEQ ID NO: 161, and 23.13 CCCTTTGACGTTGGAGTCCA, SEQ ID NO: 162) and one TTC PAM spacer performed in duplicate (spacer 23.11 TCCCCGATATGCACCACCGG, SEQ ID NO: 154), and the mean of triplicate measurements was plotted on a log₂ enrichment scale as a heatmap for the measured variants of CasX 515. Variants of CasX 515 that retained full cleavage competence compared to CasX 515 exhibited log₂ enrichment values around zero; variants with loss of cleavage function exhibited log₂ values less than zero, while variants with improved cleavage using this selection resulted in log₂ values greater than zero compared to the values of CasX 515. Experiments to generate the heatmaps of FIGS. 34-36 were performed using the following single spacers (11.2 AAGTGGCTGCGTACCACACC, SEQ ID NO: 163; 23.27 GTACATCCACAAACAGACGA, SEQ ID NO: 164; and 23.19 CCGATATGCACCACCGGGTA, SEQ ID NO: 157, respectively) for selectivity.

[1182] For plasmid counter-selection experiments, additional rounds of bacterial selection were performed on the final plasmid pool that resulted from CcdB selection with TTC PAM spacers. The overall scheme of the counter-selection is to allow replication of only those cells of E. coli which contain two populations of plasmids simultaneously. The first plasmid (p73) expresses a CasX protein (under inducible expression by ATc) and a sgRNA (constitutively expressed), as well as an antibiotic resistance gene (chloramphenicol). Note that this plasmid can also be used for standard forward selection assays, such as CcdB, and that the spacer sequence is completely free to vary as desired by the experimentalist. The second plasmid (p74) serves only to express an antibiotic resistance gene (kanamycin) but has been modified to contain (or not contain) target sites matching the spacer encoded in p73. Furthermore, these target sites can be designed to incorporate “mismatches” relative to the spacer sequence, consisting of non-canonical Watson-Crick base-pairing between the RNA of the spacer and the DNA of the target site. If the RNP expressed from p73 is able to cleave a target site in p74, the cell will remain only resistant to chloramphenicol. In contrast, if the RNP cannot cleave the target site, the cell will remain resistant to both chloramphenicol and kanamycin. Finally, the dual plasmid replication system described above can be achieved in two ways. In sequential methods, either plasmid can be delivered to a cell first, after which the strain is made electrocompetent and the second plasmid is delivered (both by electroporation). Previous work has shown that either order of plasmid delivery is sufficient for successful counter-selection, and both schemes were performed: in an experiment named Screen 5, p⁷³ is electroporated into competent cells harboring p74, while in Screen 6 the inverse is true. Cultures were electroporated, recovered, titered, and grown under selective conditions as above for a single round, and plasmid recovery followed by amplification, NGS, and enrichment calculation were also performed as above.

[1183] Finally, additional CcdB selections were performed in a similar manner, but with guide scaffold 235 and with alternative promoters WGAN45, Ran2, and Ran4, all targeting the toxic CcdB plasmid with spacer 23.2. These promoters are expected to more weakly express the guide RNA compared to the above CcdB selections and are thus expected to reduce the total concentration of CasX RNP in a bacterial cell. This physiological effect should reduce the overall survival of bacterial cells in the selective assay, thus increasing the dynamic range of enrichment scores and correlating more precisely with RNP nuclease activity at the TTC PAM spacer 23.2. For each promoter, three rounds of selection were performed in triplicate as above, and each round of experimentation resulted in enrichment data as above. These experiments are hereafter referred to as Screen 7.

### Results:

[1184] The results portrayed in FIG. 32 demonstrate that CasX 515 complexed with guide scaffold 174 is capable of cleaving the CcdB expression plasmid when targeted using spacers (listed below) that target DNA sequences associated with TTC PAM sequences. In contrast, spacers utilizing alternative PAM sequences exhibited far more variable survival. ATC PAM spacers (listed below) ranged in survival from a few percent to much less than 0.1%, while CTC PAM spacers (listed below) enabled survival in a range from >50% to less than 1%. Finally, GTC PAM spacers (listed below) only enabled survival at or below 0.1%. These benchmarking data support the experimental design of this selection pipeline and demonstrate the robust selective power of the CcdB bacterial assay. Specifically, CasX proteins unable to cleave double-stranded DNA are de-enriched by at least four orders of magnitude, while CasX proteins biochemically competent for cleavage will survive the assay.

[1185] The heatmaps of FIG. 33 were used to identify the set of variants of CasX 515 that are biochemically competent for dsDNA cleavage at target DNA sequences associated with a TTC PAM sequence, the heatmaps of FIG. 34 and FIG. 35 were used to identify those variants exhibiting improved for dsDNA cleavage at target DNA sequences associated with PAM sequences of CTC (spacers 11.2 and 23.27), while the heatmaps of FIG. 36 were generated from the same set of variants for a spacer associated with PAM sequences of ATC (spacer (23.19).

[1186] The results of FIGS. 33A-E identify and categorize variants of CasX 515 competent for editing at three TTC PAM target sites. These three datasets, either individually, or combined, represent underlying biochemical differences between variants and identify regions of interest for future engineering of improved CasX therapeutics for human genome editing. As evidence for this, internal controls were included uniformly as part of the naive library, such as the presence of a stop codon at each position throughout the protein. These stop codons were consistently observed to be lost throughout rounds of selection, consistent with the expectation that partially truncated CasX 515 should not enable dsDNA cleavage. Similarly, variants with a loss of activity reflected in the heatmap data were observed to have become depleted during the selection, and thus have a severe loss of fitness for double-stranded DNA cleavage in this assay. However, variants with an enrichment value of one or greater (and a corresponding log 2 enrichment value of zero or greater) are, at minimum, neutral with respect to biochemical cleavage. Importantly, if one or more of the mutations identified in this specific subset of variants exhibit desirable properties for a therapeutic molecule, these mutations establish a structure-function relationship shown to be compatible with biochemical function. More specifically, these mutations can affect properties such as CasX protein transcription, translation, folding, stability, ribonucleoprotein (RNP) formation, PAM recognition, double-stranded DNA unwinding, non-target strand cleavage, and target strand cleavage.

[1187] FIGS. 34A-E, FIGS. 35A-E, and FIGS. 36A-E were used to identify and categorize variants competent for cleavage at sequences associated with CTC and ATC PAM sequences. Enriched variants in these datasets (enrichment >1, equivalent to log₂ enrichment for values of approximately 0) represent mutations that specifically improve cleavage of CTC or ATC PAM target sites. Mutations meeting these criteria can be further subcategorized in two general ways: either the mutation improves cleavage rates by improving the recognition of the PAM (Type 1) or the mutation improves the overall cleavage rate of the molecule regardless of the PAM sequence (Type 2).

[1188] As examples of the first type, substitution mutations at position 223 were found to be enriched by several hundred-fold in all samples tested. This location encodes a glycine in both wild-type reference CasX proteins CasX 1 and 2, which is measured to be 6.34 angstroms from the ˜4 nucleotide position of the DNA non-target strand in the published CryoEM structure of CasX 1 (PDB ID: 6NY2). These substitution mutations at position 223 are thus physically proximal to the altered nucleotide of the novel PAM, and likely interact directly with the DNA. Further supporting this conclusion, many of the enriched substitutions encoded amino acids which are capable of forming additional hydrogen bonds relative to the replaced amino acid (glycine). These findings demonstrate that improved recognition of novel PAM sequences can be achieved in the CasX protein by introducing mutations that interact with one or both of the DNA strands, especially when physically proximal to the PAM DNA sequence (within ten angstroms). Additional features of the heatmaps in FIGS. 34-36 may represent mutations enabling increased recognition of non-canonical PAM sequences, but their mechanism of action has not yet been investigated.

[1189] As examples for the second type of mutation, the results of FIGS. 34A-E, 35A-E and 36A-E heatmaps were used to identify mutations that improve the overall cleavage rate compared to CasX 515, but without necessarily specifically recognizing the PAM sequence of the DNA. For example, a variant of CasX 515 consisting of an insertion of arginine at position 27 was measured to have an enrichment value greater than one in the selection with spacer 11.2 (CTC PAM) and spacer 23.19 (ATC PAM). This variant had previously been identified by a comparable selection on a CTC PAM spacer, where this mutation was enriched by orders of magnitude (data not shown). The position of this amino acid mutation is physically proximal (9.29 angstroms) to the DNA target strand at position ˜1 in the above structural model. These insights suggest a mechanism where the mature R-loop formed by CasX RNP with double-stranded DNA is stabilized by the side chain of the arginine, perhaps by ionic interactions of the positively charged side chain with the negatively charged backbone of the DNA target strand. Such an interaction is beneficial to overall cleavage kinetics without altering the PAM specificity. These data support the conclusion that some enriched mutations shown in FIGS. 34A-E, 35A-E and 36A-E represent variants that improve the overall cleavage activity of CasX 515 by physically interacting with either or both of the DNA strands when physically proximal to them (within ten angstroms).

[1190] The data support the conclusion that many of the mutations measured to improve cleavage at sequences associated with the CTC or ATC PAM sequences identified from the heatmaps in FIGS. 34A-E, 35A-E and 36A-E can be classified as either of the two types of mutations specified above. For mutations of type one, variants consisting of mutations to position 223 with a large enrichment score in at least one of the spacers tested at CTC PAMs are listed in Table 21, with the associated maximum enrichment score. For mutations of type two, a smaller list of mutations was chosen systematically from among the thousands of enriched variants. To identify those mutations highly likely to improve the overall cleavage activity compared to CasX 515, the following approach was taken. First, mutations were filtered for those which were most consistently enriched across CTC or ATM PAM spacers. A lower bound (LB) was defined for the enrichment score of each mutation for each spacer. LB was defined as the combined log₂ enrichment score across biological triplicates, minus the standard deviation of the log₂ enrichment scores for the individual replicates. Second, the subset of these mutations was taken in which LB >1 for at least two out of three independent experimental datasets (one ATC PAM selection and two CTC PAM selections). Third, this subset of mutations was further reduced by excluding those for which a negative log₂ enrichment was measured in any of the three TTC PAM selections. Finally, individual mutations were manually selected based on a combination of structural features and strong enrichment score in at least one experiment. The resulting 274 mutations meeting these criteria are listed in Table 22, along with the maximum observed log 2 enrichment score from the two CTC or one ATC PAM experiments represented in the heatmaps of FIGS. 34A-E, 35A-E and 36A-E, as well as the domain in which the mutation is located.

[1191] In contrast to Class I mutations, there exists another category of mutations that improve the ability of the CasX RNP to discriminate between on-target and off-target sites in genomic DNA, as determined by the spacer sequence, termed Class II, which improve the spacer specificity of the nuclease activity of the CasX protein. Two additional experiments were performed to specifically identify Class II mutations, where these experiments consisted of plasmid counter-selections and resulted in enrichment scores representing the sensitivity of the generated variant, compared to CasX 515, to a single mismatch between the spacer sequence of the guide RNA and the intended target DNA. The resulting enrichment scores were ranked for all observed mutations across the experimental data, and the following analyses were performed to identify a subset of mutations likely to improve the spacer specificity of the CasX protein without substantially reducing the nuclease activity at the desired on-target site. First, mutations from Screen 5 were ranked by their average enrichment score across three technical replicates using Spacer 23.2. Those mutations which were physically proximal to the nucleotide mismatch, as inferred from published models of the CasX RNP bound to a target site (PDB ID: 6NY2), were removed in order to discard those Class II mutations that might only confer improvements to specificity at Spacer 23.2 only, rather than universally across spacers. Finally, these Class II mutations were discarded if their cleavage activity at on-target TTC PAM sites was negatively impacted by the mutation if their average log 2 enrichment from the three TTC PAM CcdB selections was less than zero. The resulting mutations meeting these crieteria are listed in Table 23, along with the maximum observed log₂ enrichment score from Screen 5 and the domain in which the mutation is located. Additionally, Class II mutations were identified from the counter-selection experiment Screen 6. These mutations were similarly ranked by their mean enrichment scores, but different filtering steps were applied. In particular, mutations were identified from each of the following categories: those with the highest mean enrichment scores from either Spacer 23.2, Spacer 23.11, or Spacer 23.13; those with the highest combined mean enrichment scores from Spacer 23.2 and Spacer 23.11; those with the highest combined mean enrichment scores from Spacer 23.11 and Spacer 23.13; or those with the highest combined mean enrichment scores from Spacer 23.2 in Screen 5 and Spacer 23.2 in Screen 6. These resulting mutations are listed in Table 23, along with the maximum observed log 2 enrichment score from Screen 6 and the domain in which the mutation is located.

[1192] In addition to the Class I or Class II mutations, there exists another category of mutations that has been directly observed to improve the dsDNA editing activity at TTC PAM sequences. These mutations, termed Class III mutations, demonstrated improved nuclease activity by way of exhibiting enrichment scores above that of CasX 515 when targeting the CcdB plasmid using Spacer 23.2 in Screen 7. A computational filtering step was used to identify a subset of these enriched mutations which are of particular interest. Specifically, mutations were identified that had an average enrichment value across three replicates that was greater than zero for each of the three promoters tested. Finally, features of the enrichment scores across the amino acid sequence were used to identify additional mutations at enriched positions. Example features of interest included the following: insertions or deletions at the junction of protein domains in order to facilitate toplogical changes; substitutions of an amino acid for proline in order to kink the polypeptide backbone; substitutions of an amino acid for a positively charged amino acid in order to add ionic bonding between the protein and the negatively charged nucleic acid backbone of either the guide RNA or either strand of the target DNA; deletions of an amino acid where consecutive deletions are both highly enriched; subsitutions to a position that contains many highly enriched substitutions; substitutions of an amino acid for a highly enriched amino acid at the extreme N-terminus of the protein. These resulting mutations are listed in Table 24, along with the maximum observed log 2 enrichment score from Screen 6 and the domain in which the mutation is located.

TABLE 21
Mutations to CasX 515 (SEQ ID NO: 416) that improve
cleavage activity at CTC PAM sequences by physically
interacting with the PAM nucleotides of the DNA

| | | | Maximum observed | |
|---|---|---|---|---|
| | | | log₂ enrichment in | |
| Position | Reference | Alternate | Ccdb selections | Domain |
| 223 | G | Y | 4.6 | helical I-II |
| 223 | G | N | 5.7 | helical I-II |
| 223 | G | H | 4.2 | helical I-II |
| 223 | G | S | 4.6 | helical I-II |
| 223 | G | T | 3.8 | helical I-II |
| 223 | G | A | 6.3 | helical I-II |
| 223 | G | V | 3.6 | helical I-II |

TABLE 22
Mutations to CasX 515 (SEQ ID NO: 416) systematically
identified from all datasets to improve cleavage
activity at ATC and CTC PAM sequences

| | | | Maximum observed | |
|---|---|---|---|---|
| | | | log₂ enrichment in | |
| Position | Reference | Alternate | CcdB selections | Domain |
| 3 | — | G | 3.0 | OBD-I |
| 3 | I | G | 3.5 | OBD-I |
| 3 | I | E | 4.5 | OBD-I |
| 4 | — | G | 2.5 | OBD-I |
| 4 | K | G | 2.5 | OBD-I |
| 4 | K | P | 3.1 | OBD-I |
| 4 | K | S | 3.3 | OBD-I |
| 4 | K | W | 2.8 | OBD-I |
| 5 | — | P | 3.5 | OBD-I |
| 5 | — | G | 3.1 | OBD-I |
| 5 | R | S | 3.7 | OBD-I |
| 5 | — | S | 2.2 | OBD-I |
| 5 | R | A | 3.2 | OBD-I |
| 5 | R | P | 3.6 | OBD-I |
| 5 | R | G | 3.2 | OBD-I |
| 5 | R | L | 2.7 | OBD-I |
| 6 | I | A | 3.3 | OBD-I |
| 6 | — | G | 3.7 | OBD-I |
| 7 | N | Q | 3.1 | OBD-I |
| 7 | N | L | 2.7 | OBD-I |
| 7 | N | S | 3.7 | OBD-I |
| 8 | K | G | 3.3 | OBD-I |
| 15 | K | F | 3.0 | OBD-I |
| 16 | D | W | 2.8 | OBD-I |
| 16 | — | F | 4.2 | OBD-I |
| 18 | — | F | 3.5 | OBD-I |
| 28 | M | H | 2.5 | OBD-I |
| 33 | V | T | 2.0 | OBD-I |
| 34 | R | P | 3.6 | OBD-I |
| 36 | M | Y | 2.4 | OBD-I |
| 41 | R | P | 2.2 | OBD-I |
| 47 | L | P | 2.2 | OBD-I |
| 52 | E | P | 3.2 | OBD-I |
| 55 | — | P | 2.7 | OBD-I |
| 55 | PQ | — | 3.0 | OBD-I |
| 56 | Q | S | 1.9 | OBD-I |
| 56 | — | D | 2.5 | OBD-I |
| 56 | — | T | 2.8 | OBD-I |
| 56 | Q | P | 3.9 | OBD-I |
| 58 | — | A | 2.2 | helical I-I |
| 63 | R | S | 3.0 | helical I-I |
| 63 | R | Q | 2.7 | helical I-I |
| 72 | D | E | 2.7 | helical I-I |
| 81 | L | V | 2.8 | helical I-I |
| 81 | L | T | 2.7 | helical I-I |
| 85 | W | G | 3.2 | helical I-I |
| 85 | W | F | 2.7 | helical I-I |
| 85 | W | E | 2.9 | helical I-I |
| 85 | W | D | 3.1 | helical I-I |
| 85 | W | A | 2.8 | helical I-I |
| 85 | W | Q | 3.0 | helical I-I |
| 85 | W | R | 3.7 | helical I-I |
| 88 | F | M | 2.4 | helical I-I |
| 89 | Q | D | 2.5 | helical I-I |
| 93 | V | L | 1.9 | helical I-I |
| 109 | Q | P | 1.8 | NTSB |
| 115 | E | S | 1.8 | NTSB |
| 120 | G | D | 2.4 | NTSB |
| 133 | G | T | 2.2 | NTSB |
| 141 | L | A | 2.2 | NTSB |
| 168 | L | K | 3.1 | NTSB |
| 170 | A | Y | 2.7 | NTSB |
| 170 | A | S | 1.7 | NTSB |
| 175 | E | A | 2.0 | NTSB |
| 175 | E | D | 2.8 | NTSB |
| 175 | E | P | 3.8 | NTSB |
| 223 | G | — | 1.4 | helical I-II |
| 223 | G | S | 8.8 | helical I-II |
| 223 | G | T | 3.7 | helical I-II |
| 242 | S | T | 1.9 | helical I-II |
| 247 | I | T | 1.8 | helical I-II |
| 254 | V | T | 2.5 | helical I-II |
| 265 | L | Y | 1.9 | helical I-II |
| 288 | K | G | 4.2 | helical I-II |
| 288 | K | S | 4.0 | helical I-II |
| 291 | V | L | 2.6 | helical I-II |
| 303 | M | T | 2.3 | helical I-II |
| 303 | M | W | 2.7 | helical I-II |
| 328 | G | N | 3.3 | helical I-II |
| 331 | S | Q | 2.7 | helical I-II |
| 334 | — | A | 2.3 | helical II |
| 334 | LV | — | 3.0 | helical II |
| 335 | V | E | 2.8 | helical II |
| 335 | V | Q | 2.7 | helical II |
| 335 | V | F | 2.5 | helical II |
| 335 | V | — | 3.2 | helical II |
| 336 | E | P | 2.9 | helical II |
| 336 | E | — | 3.1 | helical II |
| 336 | E | D | 2.7 | helical II |
| 336 | E | L | 2.4 | helical II |
| 336 | E | R | 2.7 | helical II |
| 337 | R | N | 2.5 | helical II |
| 338 | Q | V | 2.5 | helical II |
| 338 | — | Q | 3.0 | helical II |
| 339 | — | G | 2.6 | helical II |
| 341 | — | H | 2.9 | helical II |
| 341 | — | A | 2.0 | helical II |
| 342 | V | D | 2.7 | helical II |
| 342 | — | T | 2.3 | helical II |
| 342 | V | — | 3.0 | helical II |
| 342 | — | F | 2.5 | helical II |
| 343 | — | D | 3.3 | helical II |
| 343 | D | — | 2.0 | helical II |
| 344 | W | — | 3.1 | helical II |
| 344 | W | T | 2.8 | helical II |
| 344 | W | H | 2.8 | helical II |
| 344 | — | P | 3.0 | helical II |
| 344 | — | G | 2.6 | helical II |
| 345 | — | R | 3.2 | helical II |
| 345 | W | P | 3.1 | helical II |
| 345 | W | D | 2.3 | helical II |
| 345 | — | D | 2.9 | helical II |
| 345 | W | L | 2.3 | helical II |
| 346 | — | P | 2.4 | helical II |
| 346 | — | D | 2.9 | helical II |
| 347 | M | — | 2.6 | helical II |
| 348 | — | T | 3.3 | helical II |
| 350 | N | I | 2.3 | helical II |
| 351 | V | N | 2.8 | helical II |
| 351 | V | H | 3.1 | helical II |
| 352 | K | D | 2.2 | helical II |
| 354 | L | D | 3.1 | helical II |
| 355 | I | S | 2.6 | helical II |
| 357 | E | C | 2.1 | helical II |
| 357 | E | P | 2.8 | helical II |
| 358 | K | T | 2.8 | helical II |
| 359 | K | E | 2.7 | helical II |
| 363 | K | L | 3.3 | helical II |
| 363 | K | Y | 2.2 | helical II |
| 367 | Q | D | 2.8 | helical II |
| 367 | Q | P | 3.0 | helical II |
| 369 | — | S | 2.6 | helical II |
| 369 | LA | — | 2.4 | helical II |
| 373 | K | L | 2.2 | helical II |
| 374 | — | R | 2.0 | helical II |
| 397 | Y | T | 2.5 | helical II |
| 400 | G | M | 2.0 | helical II |
| 402 | L | V | 2.4 | helical II |
| 403 | L | C | 2.3 | helical II |
| 404 | L | D | 2.5 | helical II |
| 404 | L | N | 2.5 | helical II |
| 404 | L | W | 2.3 | helical II |
| 404 | L | Y | 2.1 | helical II |
| 407 | E | F | 2.6 | helical II |
| 407 | E | L | 2.2 | helical II |
| 407 | E | Y | 2.6 | helical II |
| 411 | G | P | 2.6 | helical II |
| 411 | — | E | 3.2 | helical II |
| 413 | — | T | 2.7 | helical II |
| 413 | — | R | 2.4 | helical II |
| 413 | — | W | 3.0 | helical II |
| 413 | — | Y | 3.7 | helical II |
| 414 | — | W | 2.6 | helical II |
| 414 | — | Y | 3.1 | helical II |
| 414 | W | G | 3.0 | helical II |
| 414 | W | R | 2.6 | helical II |
| 416 | K | D | 2.7 | helical II |
| 416 | K | H | 2.0 | helical II |
| 416 | K | P | 2.6 | helical II |
| 416 | K | T | 2.3 | helical II |
| 417 | V | L | 2.6 | helical II |
| 417 | V | A | 2.5 | helical II |
| 418 | Y | C | 2.7 | helical II |
| 419 | D | G | 3.2 | helical II |
| 419 | D | M | 2.4 | helical II |
| 419 | D | P | 2.4 | helical II |
| 425 | I | C | 2.2 | helical II |
| 427 | K | T | 2.4 | helical II |
| 428 | K | R | 2.5 | helical II |
| 430 | E | G | 1.9 | helical II |
| 432 | L | A | 1.9 | helical II |
| 434 | K | H | 2.2 | helical II |
| 436 | I | T | 2.4 | helical II |
| 436 | I | S | 3.0 | helical II |
| 436 | I | Q | 2.7 | helical II |
| 437 | K | D | 3.1 | helical II |
| 442 | R | D | 2.5 | helical II |
| 442 | R | — | 2.7 | helical II |
| 446 | D | E | 2.3 | helical II |
| 446 | — | D | 2.3 | helical II |
| 450 | K | P | 2.3 | helical II |
| 452 | A | R | 2.0 | helical II |
| 453 | L | T | 3.2 | helical II |
| 456 | W | L | 2.2 | helical II |
| 457 | L | C | 2.2 | helical II |
| 459 | A | L | 2.0 | helical II |
| 461 | A | T | 2.7 | helical II |
| 461 | A | K | 2.1 | helical II |
| 465 | I | E | 3.1 | helical II |
| 465 | — | C | 2.9 | helical II |
| 466 | — | S | 3.5 | helical II |
| 466 | — | G | 2.5 | helical II |
| 467 | — | R | 2.4 | helical II |
| 467 | G | P | 2.0 | helical II |
| 468 | L | K | 3.6 | helical II |
| 468 | L | D | 3.2 | helical II |
| 468 | L | S | 3.0 | helical II |
| 468 | L | H | 3.3 | helical II |
| 470 | E | — | 2.4 | helical II |
| 472 | D | R | 2.2 | helical II |
| 472 | — | D | 2.4 | helical II |
| 473 | — | P | 2.6 | helical II |
| 474 | — | D | 2.7 | helical II |
| 475 | EF | — | 2.8 | helical II |
| 475 | — | Q | 2.7 | helical II |
| 476 | F | K | 2.8 | helical II |
| 476 | F | — | 2.2 | helical II |
| 477 | — | G | 2.8 | helical II |
| 479 | C | D | 3.1 | helical II |
| 480 | — | V | 2.2 | helical II |
| 480 | E | D | 2.3 | helical II |
| 481 | — | H | 2.2 | helical II |
| 481 | L | R | 2.9 | helical II |
| 482 | K | R | 2.1 | helical II |
| 483 | L | H | 2.7 | helical II |
| 484 | Q | C | 2.1 | helical II |
| 485 | K | P | 3.0 | helical II |
| 490 | L | S | 2.8 | helical II |
| 498 | E | L | 2.1 | helical II |
| 499 | — | F | 1.6 | helical II |
| 511 | K | T | 6.8 | OBD-II |
| 524 | — | P | 2.4 | OBD-II |
| 553 | — | S | 2.4 | OBD-II |
| 558 | — | R | 1.9 | OBD-II |
| 570 | M | T | 2.7 | OBD-II |
| 582 | I | T | 1.9 | OBD-II |
| 592 | Q | I | 2.1 | OBD-II |
| 592 | Q | F | 2.8 | OBD-II |
| 592 | Q | V | 2.0 | OBD-II |
| 592 | Q | A | 2.9 | OBD-II |
| 641 | — | R | 2.3 | OBD-II |
| 643 | — | D | 2.7 | OBD-II |
| 644 | — | W | 2.5 | OBD-II |
| 645 | — | A | 2.4 | OBD-II |
| 650 | — | I | 2.5 | RuvC-I |
| 651 | — | S | 2.4 | RuvC-I |
| 652 | — | T | 2.4 | RuvC-I |
| 652 | — | N | 2.3 | RuvC-I |
| 653 | — | R | 2.3 | RuvC-I |
| 653 | — | K | 2.2 | RuvC-I |
| 654 | — | H | 2.2 | RuvC-I |
| 654 | — | S | 2.3 | RuvC-I |
| 658 | V | L | 1.9 | RuvC-I |
| 695 | G | W | 1.4 | RuvC-I |
| 695 | G | R | 3.5 | RuvC-I |
| 708 | K | S | 3.0 | RuvC-I |
| 708 | K | T | 2.9 | RuvC-I |
| 708 | K | E | 3.1 | RuvC-I |
| 711 | V | A | 1.6 | RuvC-I |
| 726 | K | E | 2.0 | RuvC-I |
| 729 | N | G | 2.8 | RuvC-I |
| 736 | R | H | 2.7 | RuvC-I |
| 736 | R | G | 2.4 | RuvC-I |
| 771 | M | S | 3.7 | RuvC-I |
| 771 | M | A | 3.3 | RuvC-I |
| 792 | L | F | 2.5 | RuvC-I |
| 868 | V | D | 1.9 | TSL |
| 877 | — | A | 2.0 | TSL |
| 886 | T | E | 1.8 | TSL |
| 886 | T | D | 2.5 | TSL |
| 886 | T | N | 1.6 | TSL |
| 888 | G | D | 2.5 | TSL |
| 890 | S | — | 3.0 | TSL |
| 891 | G | — | 2.7 | TSL |
| 892 | — | E | 2.0 | TSL |
| 892 | — | N | 2.9 | TSL |
| 895 | S | I | 1.7 | TSL |
| 908 | E | D | 1.7 | TSL |
| 932 | S | M | 2.5 | RuvC-II |
| 932 | S | V | 2.6 | RuvC-II |
| 944 | — | L | 1.4 | RuvC-II |
| 947 | — | G | 1.9 | RuvC-II |
| 949 | T | — | 1.9 | RuvC-II |
| 951 | G | I | 3.7 | RuvC-II |

TABLE 23
Mutations to CasX 515 (SEQ ID NO: 416) systematically identified
from all datasets to improve spacer specificity

| | | | Maximum observed log₂ | |
|---|---|---|---|---|
| | | | enrichment in | |
| Position | Reference | Alternate | counter-selections | Domain |
| 6 | I | L | 2.25 | OBD-I |
| 48 | — | P | 2 | OBD-I |
| 87 | — | G | 3.96 | helical I-I |
| 90 | K | V | 4.84 | helical I-I |
| 155 | F | V | 2.13 | NTSB |
| 215 | — | T | 2.03 | helical I-II |
| 216 | — | C | 3.03 | helical I-II |
| 220 | Y | F | 2.1 | helical I-II |
| 264 | S | H | 3.16 | helical I-II |
| 329 | — | Q | 2.71 | helical I-II |
| 343 | D | S | 2.69 | helical II |
| 346 | DM | — | 2.96 | helical II |
| 349 | — | P | 2.06 | helical II |
| 357 | — | G | 2.11 | helical II |
| 375 | QE | — | 2.34 | helical II |
| 378 | L | N | 2.38 | helical II |
| 389 | K | O | 2.29 | helical II |
| 417 | — | L | 2.75 | helical II |
| 441 | E | L | 2.36 | helical II |
| 458 | R | D | 2.2 | helical II |
| 459 | A | E | 2.65 | helical II |
| 476 | FC | — | 2.34 | helical II |
| 503 | IL | — | 2.15 | OBD-II |
| 537 | K | G | 2.85 | OBD-II |
| 621 | L | T | 2.45 | OBD-II |
| 624 | — | A | 3 | OBD-II |
| 783 | L | Y | 2.08 | RuvC-I |
| 783 | — | P | 2.6 | RuvC-I |
| 787 | L | — | 2.49 | RuvC-I |
| 787 | L | R | 3.58 | RuvC-I |
| 787 | L | D | 5.58 | RuvC-I |
| 788 | — | Q | 2.65 | RuvC-I |
| 789 | — | R | 2.5 | RuvC-I |
| 789 | — | N | 2.71 | RuvC-I |
| 790 | E | N | 2.45 | RuvC-I |
| 792 | — | P | 2.85 | RuvC-I |
| 793 | P | A | 2.93 | RuvC-I |
| 795 | K | Q | 2.45 | RuvC-I |
| 796 | T | V | 2.75 | RuvC-I |
| 798 | — | R | 4.07 | RuvC-I |
| 799 | — | H | 2.79 | RuvC-I |
| 801 | T | Q | 3.16 | RuvC-I |
| 801 | — | H | 3.34 | RuvC-I |
| 801 | — | R | 2.86 | RuvC-I |
| 802 | — | L | 2.88 | RuvC-I |
| 802 | L | — | 2.87 | RuvC-I |
| 802 | — | W | 3.08 | RuvC-I |
| 803 | — | A | 3.19 | RuvC-I |
| 803 | — | F | 3.14 | RuvC-I |
| 803 | A | S | 5.79 | RuvC-I |
| 804 | Q | K | 3.05 | RuvC-I |
| 805 | Y | — | 3.29 | RuvC-I |
| 806 | T | Y | 3.07 | RuvC-I |
| 806 | T | F | 2.49 | RuvC-I |
| 807 | — | I | 3.21 | RuvC-I |
| 807 | S | P | 2.61 | RuvC-I |
| 809 | T | P | 3.2 | RuvC-I |
| 809 | — | N | 3.1 | RuvC-I |
| 810 | C | K | 3.19 | RuvC-I |
| 810 | C | M | 3.08 | RuvC-I |
| 811 | — | M | 2.51 | TSL |
| 812 | N | — | 3.07 | TSL |
| 812 | — | V | 2.68 | TSL |
| 813 | C | S | 2.3 | TSL |
| 814 | — | G | 3.15 | TSL |
| 814 | — | W | 3.04 | TSL |
| 815 | F | P | 3.09 | TSL |
| 817 | — | W | 2.87 | TSL |
| 828 | K | G | 1.99 | TSL |
| 906 | V | C | 2.01 | TSL |

TABLE 24
Mutations to CasX 515 (SEQ ID NO: 416) systematically
identified from all datasets to improve cleavage
activity at TTC PAM sequences

| | | | Maximum observed log₂ | |
|---|---|---|---|---|
| | | | enrichment in Ccdb | |
| Position | Reference | Alternate | selections | Domain |
| 4 | K | W | 3.51 | OBD-I |
| 5 | R | P | 4.01 | OBD-I |
| 27 | — | P | 4.69 | OBD-I |
| 28 | M | P | 3.69 | OBD-I |
| 56 | Q | P | 3.78 | OBD-I |
| 85 | W | A | 3.96 | helical I-I |
| 102 | — | G | 4.75 | NTSB |
| 104 | — | I | 4.43 | NTSB |
| 104 | — | L | 4.52 | NTSB |
| 130 | S | — | 4.02 | NTSB |
| 151 | Y | T | 3.46 | NTSB |
| 168 | L | D | 3.32 | NTSB |
| 168 | L | E | 4.08 | NTSB |
| 188 | K | Q | 4.96 | NTSB |
| 190 | G | Q | 4.1 | NTSB |
| 223 | G | — | 1.63 | helical I-II |
| 235 | G | L | 4.64 | helical I-II |
| 235 | G | H | 4.97 | helical I-II |
| 239 | S | H | 3.93 | helical I-II |
| 239 | S | T | 4.97 | helical I-II |
| 245 | Q | H | 5 | helical I-II |
| 288 | K | D | 5.08 | helical I-II |
| 288 | K | E | 4.79 | helical I-II |
| 303 | M | R | 3.71 | helical I-II |
| 303 | M | K | 3.29 | helical I-II |
| 307 | L | K | 3.55 | helical I-II |
| 328 | G | R | 3.91 | helical I-II |
| 328 | G | K | 4.58 | helical I-II |
| 334 | — | H | 5.65 | helical II |
| 335 | — | D | 5.5 | helical II |
| 335 | V | P | 5.1 | helical II |
| 345 | — | Q | 5.22 | helical II |
| 441 | — | K | 5.07 | helical II |
| 477 | C | R | 2.94 | helical II |
| 477 | C | K | 3.49 | helical II |
| 502 | S | — | 4.04 | OBD-II |
| 503 | I | R | 3.72 | OBD-II |
| 503 | I | K | Not detected | OBD-II |
| 504 | L | — | 4.24 | OBD-II |
| 542 | R | E | 4.54 | OBD-II |
| 563 | K | — | 3.25 | OBD-II |
| 593 | — | A | 1.83 | OBD-II |
| 610 | K | Q | 3.46 | OBD-II |
| 615 | R | Q | 3.67 | OBD-II |
| 643 | — | A | 2.42 | OBD-II |
| 697 | S | R | 2.67 | RuvC-I |
| 697 | S | K | 2.55 | RuvC-I |
| 906 | V | T | 4.65 | TSL |

### Example 15: Evaluation of Spacer Length on Editing in Cells when Delivered as RNP

[1193] The purpose of the experiment was to determine the effect of spacer (targeting sequence) length on editing a target nucleic acid by RNPs of CasX and guides delivered intracellularly.

[1194] CasX variant 491 was purified as described above. Guide RNAs with scaffold 174 were prepared by in vitro transcription (IVT). IVT templates were generated by PCR using Q5 polymerase (NEB M0491) according to the recommended protocol, template oligos for each scaffold backbone, and amplification primers with the T7 promoter and either the 15.3 (CAAACAAATGTGTCACAAAG, SEQ ID NO: 165) or 15.5 (GGAATAATGCTGTTGTTGAA, SEQ ID NO: 166) spacer at full-length (20 nucleotides) or truncated by one or two nucleotides from the 3′ end of the respective spacer (sequences in Table 26). The sequences of the primers used to generate the IVT templates are shown in Table 25. The resulting templates were then used with T7 RNA polymerase to produce RNA guides according to standard protocols. The guides were purified using denaturing polyacrylamide gel electrophoresis and refolded prior to use. Individual RNPs were assembled by mixing protein with a 1.2-fold molar excess of guide in buffer containing 25 mM sodium phosphate buffer (pH 7.25), 300 mM NaCl, 1 mM MgCl2, and 200 mM trehalose. RNPs were incubated at 37° C. for 10 minutes and then purified via size exclusion chromatography and exchanged into buffer containing 25 mM sodium phosphate buffer (pH 7.25), 150 mM NaCl, 1 mM MgCl2, and 200 mM trehalose (Buffer 1). The concentration of the RNP was determined following purification using the Pierce 660 nm protein assay.

[1195] Purified RNPs were tested for editing at the T Cell Receptor a (TCRα) locus in Jurkat cells. RNPs were delivered by electroporation using the Lonza 4-D nucleofector system. 700,000 cells were resuspended in 20 μL of Lonza buffer SE and added to RNP diluted in Buffer 1 to the appropriate concentration and a final volume of 2 μL. Cells were electroporated using the Lonza 96-well shuttle system using the protocol CL-120. Cells were recovered at 37° C. in pre-equilibrated RPMI and then each electroporation condition was split into three wells of a 96-well plate. Cells were exchanged into fresh RPMI one day after nucleofection. On day three post-nucleofection, cells were stained with Alexa Fluor 647-labeled antibody against TCRα/β (BioLegend) and assessed for loss of surface TCRα/β using an Attune Nxt flow cytometer. A fraction of Jurkat cells does not stain positive for TCRα/β in the absence of editing. To account for this and estimate the actual percentage of cells that had TCRα knocked out via editing, the formula TCR_{KO}=(TCR-_{obs}−TCR-_{neg})/(1−TCR-_{neg}) was applied, where TCR_{KO} is the estimated knockout rate of TCRα, TCR-_{obs} is the observed fraction of cells negative for TCR staining in the experimental sample, and TCR-_{neg} is the fraction of cells negative for TCR staining in the no RNP control sample. This formula assumes that cells that do and do not express TCRα/β are edited at equal rates. The corrected fraction of TCRα knockout cells were plotted against the concentration of RNP using Prism. For each spacer, the three spacer lengths were fit with dose response curves using shared parameters except for the EC50. The reported p-values are the probability that the dose curve for the 20-nt spacer and that of the compared truncated spacer can be modeled with the same EC50 parameter.

TABLE 25
Oligonucleotides used to generate IVT templates

| Construct | DNA sequence |
|---|---|
| Scaffold 174 | GAAATTAATACGACTCACTATAACTGGCG |
| template fwd | CTTTTATCTGATTACTTTGAGAGCCATCA |
| | CCAGCGACTATGTCGTAGTGGGTAAAGCT |
| | (SEQ ID NO: 1088) |
| Scaffold 174 | CTTTGATGCTCCCTCCGAAGAGGGAGCTT |
| template rev | TACCCACTACGACATAGTCGC |
| | (SEQ ID NO: 1089) |
| T7 | GAAATTAATACGACTCACTATA |
| amplification | (SEQ ID NO: 169) |
| primer | |
| 15.3 20-nt | CTTTGTGACACATTTGTTTGCTTTGATGC |
| spacer primer | TCCCTCC (SEQ ID NO: 1093) |
| 15.3 19-nt | TTTGTGACACATTTGTTTGCTTTGATGCT |
| spacer primer | CCCTCC (SEQ ID NO: 1094) |
| 15.3 18-nt | TTGTGACACATTTGTTTGCTTTGATGCTC |
| spacer primer | CCTCC (SEQ ID NO: 1095) |
| 15.5 20-nt | TTCAACAACAGCATTATTCCCTTTGATGC |
| spacer primer | TCCCTCC (SEQ ID NO: 1096) |
| 15.5 19-nt | TCAACAACAGCATTATTCCCTTTGATGCT |
| spacer primer | CCCTCC (SEQ ID NO: 1097) |
| 15.5 18-nt | CAACAACAGCATTATTCCCTTTGATGCTC |
| spacer primer | CCTCC (SEQ ID NO: 1098) |

TABLE 26
Spacer Sequences

| Construct | RNA sequence |
|---|---|
| 15.3 20-nt spacer | CAAACAAAUGUGUCACAAAG |
| | (SEQ ID NO: 1099) |
| 15.3 19-nt spacer | CAAACAAAUGUGUCACAAA |
| | (SEQ ID NO: 1100) |
| 15.3 18-nt spacer | CAAACAAAUGUGUCACAA |
| | (SEQ ID NO: 1101) |
| 15.5 20-nt spacer | GGAAUAAUGCUGUUGUUGAA |
| | (SEQ ID NO: 1102) |
| 15.5 19-nt spacer | GGAAUAAUGCUGUUGUUGA |
| | (SEQ ID NO: 1103) |
| 15.5 18-nt spacer | GGAAUAAUGCUGUUGUUG |
| | (SEQ ID NO: 1104) |

[1196] Results: CasX RNPs were assembled using CasX variant 491 and guides composed of scaffold 174 with either spacer 15.3 or 15.5, both of which target the constant region of the TCRα gene. Guides with full-length 20-nt spacers as well as truncated 19- and 18-nt spacers were tested to determine whether use of shorter spacers supported increased editing when pre-assembled RNPs are nucleofected for ex vivo editing. RNPs were tested at 2-fold dilutions ranging from 0.3125 μM to 2.5 μM in a 22 μL nucleofection reaction. Editing was assessed by flow cytometry three days after nucleofection. For both spacer sequences, the RNPs with truncated spacers largely edited more efficiently than those with 20-nt spacers across the dose range (FIGS. 37A-B, dose-response curves). For spacer 15.3, the 18-nt and 19-nt spacers had EC50 values of 0.225 μM and 0.299 μM, respectively, as compared to 1.414 μM for the 20-nt spacer (p<0.0001 for both truncations; extra-sum-of-squares F test). For spacer 15.5, the 18-nt spacer had an EC50 of 0.519 μM vs 0.938 μM for the 20-nt spacer (p=0.0001), while the 19-nt spacer was more similar to the 20-nt spacer, with an EC50 of 0.808 μM (p=0.0762). Despite the fact that the 19-nt 15.3 spacer had editing similar to the 18-nt spacer while the 19-nt 15.5 spacer more closely resembles the corresponding 20-nt spacer, for both spacers tested, however, the direction of the trend remained consistent and suggests that using guides with 18-nt spacers may be a generalizable strategy for increasing editing when the CasX editing molecule is delivered as a pre-assembled RNP, and demonstrates that shorter spacers of 18 or 19 support increased activity compared to a spacer of 20 bases in ex vivo editing by RNP.

### Example 16: The Assay Identifies CasX Protein Variants with Novel PAM Sequence Specificity

[1197] The purpose of the experiment was to identify the PAM sequence specificities of sequence variants of CasX protein 515 (SEQ ID NO: 416). To accomplish this, the HEK293 cell line PASS_V1.01 was treated with CasX protein 491 (SEQ ID NO:336) or 515 or a variant of 515, together with guide 174 (SEQ ID NO: 2238) and Next-generation sequencing (NGS) was performed to calculate the percent editing at a variety of spacers and associated target sites.

[1198] Materials and Methods: A multiplexed pooled approach was taken to assay clonal protein variants using the PASS system. Briefly, a pooled HEK cell line was generated and termed PASS_V1.01. Each cell within the pool contained a genome-integrated single-guide RNA (sgRNA), paired with a specific target site. After transfection of protein-expression constructs, editing at a specific target by a specific spacer could be quantified by NGS. Each guide-target pair was designed to provide data related to activity, specificity, and targetability of the CasX-guide RNP complex.

[1199] Paired spacer-target sequences were synthesized by Twist Biosciences and obtained as an equimolar pool of oligonucleotides. This pool was amplified by PCR and cloned by Golden Gate cloning to generate a final library of plasmids named p77. Each plasmid contained a sgRNA expression element and a target site, along with a GFP expression element. The sgRNA expression element consisted of a U6 promoter driving transcription of gRNA scaffold 174 (SEQ ID NO: 2238), followed by a spacer sequence which would target the RNP of the guide and CasX variant to the paired target site. 250 possible unique, paired spacer-target synthetic sequences were designed and synthesized. A pool of lentivirus was then produced from this plasmid library using the LentiX production system (Takara Bio USA, Inc) according to the manufacturer's instructions. The resulting viral preparation was then quantified by qPCR and transduced into a standard HEK293 cell line at a low multiplicity of infection so as to generate single copy integrations. The resulting cell line was then purified by fluorescence-activated cell sorting (FACS) to complete the production of PASS_V1.01. This cell line was then seeded in six-well plate format and treated in duplicate with either water or was transfected with 2 μg of plasmid p67, delivered by Lipofectamine™ Transfection Reagent (ThermoFisher) according to the manufacturer's instructions. Plasmid p67 contains an EF-1a promoter driving expression of a CasX protein tagged with the SV40 Nuclear Localization Sequence. After two days, treated PASS_V1.01 cells were collected, lysed, and genomic DNA was extracted using a genomic DNA isolation kit (Zymo Research). Genomic DNA was then PCR amplified with custom primers to generate amplicons compatible with Illumina NGS and sequenced on a NextSeq instrument. Sample reads were demultiplexed and filtered for quality. Editing outcome metrics (fraction of reads with indels) were then quantified for each spacer-target synthetic sequence across treated samples.

[1200] To assess the PAM sequence specificity for a molecule, editing outcome metrics for four different PAM sequences were categorized. For TTC PAM target sites, 48 different spacer-target pairs were quantified; for ATC, CTC, and GTC PAM target sites, 14, 22, and 11 individual target sites were quantified, respectively. The average editing efficiency and standard error of the mean for two biological replicates was calculated for each of these spacers. The average editing efficiency across the four categories of PAM sequence was also calculated, along with the standard error of the mean.

[1201] Results: Table 27 lists the average editing efficiency for the above described spacers when targeted with CasX protein variant 515, calculated as the mean of two experiments. The spacer name and associated PAM sequence are indicated. Table 28 lists the same data for CasX protein variant 534. Additionally, the average editing efficiency was calculated for each of the four categories of PAM sequence.

TABLE 27
Average editing of CasX 515 with spacers associated
with PAM sequences of TTC, ATC, CTC, or GTC

| | TTC PAM | ATC PAM | CTC PAM | GTC PAM |
|---|---|---|---|---|
| | Average | Average | Average | Average |
| | Percent | Percent | Percent | Percent |
| Spacer Name | Editing | Editing | Editing | Editing |
| Rho_11.2 | 32.60 | 3.03 | 0.00 | 4.01 |
| Rho_11.24 | 44.61 | 0.49 | 2.55 | 0.13 |
| SOD1_8.89 | 18.29 | 0.00 | 0.00 | 0.00 |
| SOD1_8.57 | 25.65 | 6.34 | 9.01 | 2.52 |
| DMD_16.30 | 36.53 | 3.24 | 0.68 | 1.07 |
| DMD_16.32 | 33.76 | 1.20 | 0.01 | 2.21 |
| BCL11A_21.1 | 38.17 | 5.19 | 11.24 | 22.85 |
| PCSK9_6.8 | 28.94 | 5.48 | 9.84 | 2.35 |
| B2M_7.37 | 48.25 | 4.31 | 3.27 | 4.24 |
| CD70_26.3 | 23.89 | 1.71 | 4.96 | 0.33 |
| DMD_16.29 | 1.29 | — | — | — |
| DMD_16.31 | 21.69 | — | — | — |
| HTT_5.1 | 32.77 | — | — | — |
| DMPK_20.7 | 19.89 | — | — | — |
| B2M_7.9 | 42.44 | — | — | — |
| CD70_26.5 | 27.52 | — | — | — |
| FSHD_25.1 | 17.74 | — | — | — |
| PMP22_18.22 | 19.65 | — | — | — |
| PTBP1_28.1 | 4.00 | — | — | — |
| VCV000162497_alt | 11.40 | — | — | — |
| VCV000037426_alt | 7.00 | — | — | — |
| VCV000052759_alt | 13.14 | — | — | — |
| VCV000031157_alt | 0.00 | — | — | — |
| VCV000217157_alt | 17.94 | — | — | — |
| VCV000048146_alt | 18.05 | — | — | — |
| VCV000039614_alt | 33.14 | — | — | — |
| VCV000217646_alt | 37.75 | — | — | — |
| VCV000408199_alt | 27.21 | — | — | — |
| VCV000431973_alt | 16.05 | — | — | — |
| VCV000004193_alt | 2.85 | — | — | — |
| VCV000003920_alt | 34.92 | — | — | — |
| VCV000224616_alt | 36.90 | — | — | — |
| VCV000004787_alt | 34.83 | — | — | — |
| VCV000013115_alt | 26.04 | — | — | — |
| VCV000195355_alt | 32.05 | — | — | — |
| VCV000190123_alt | 36.17 | — | — | — |
| VCV000048535_alt | 21.74 | — | — | — |
| VCV000468648_alt | 49.12 | — | — | — |
| VCV000000908_alt | 32.78 | — | — | — |
| VCV000066016_alt | 20.45 | — | — | — |
| VCV000184702_alt | 14.97 | — | — | — |
| VCV000003825_alt | 27.40 | — | — | — |
| VCV000014243_alt | 32.03 | — | — | — |
| VCV000046102_alt | 41.95 | — | — | — |
| VCV000050962_alt | 47.92 | — | — | — |
| VCV000011908_alt | 38.86 | — | — | — |
| VCV000252575_alt | 24.77 | — | — | — |
| SOD1_G93A_alt | 22.54 | — | — | — |
| C9orf72_29.1 | — | 20.52 | — | — |
| VCV000092361_alt | — | 6.13 | — | — |
| VCV000096602_alt | — | 0.56 | — | — |
| DUX4_25.3_alt | — | 4.02 | — | — |
| VCV000012379_alt | — | — | 0.52 | — |
| VCV000067838_alt | — | — | 0.64 | — |
| VCV000246282_alt | — | — | 0.00 | — |
| VCV000000157_alt | — | — | 2.01 | — |
| VCV000550954_alt | — | — | 1.58 | — |
| VCV000189075_alt | — | — | 4.63 | — |
| VCV000006756_alt | — | — | 2.61 | — |
| VCV000100629_alt | — | — | 3.39 | — |
| VCV000372498_alt | — | — | 2.97 | — |
| VCV000002019_alt | — | — | 1.56 | — |
| HTT_slot_1_alt | — | — | 3.13 | — |
| HTT_slot_2_alt | — | — | 0.00 | — |
| HTT_slot_3_alt | — | — | — | 2.00 |

TABLE 28
Average editing of CasX 534 at spacers associated
with PAM sequences of TTC, ATC, CTC, or GTC

| | TTC PAM | ATC PAM | CTC PAM | GTC PAM |
|---|---|---|---|---|
| | Average | Average | Average | Average |
| | Percent | Percent | Percent | Percent |
| Spacer Name | Editing | Editing | Editing | Editing |
| Rho_11.2 | 0.70 | 0.24 | 0.25 | 8.00 |
| Rho_11.24 | 2.49 | 3.16 | 5.29 | 11.50 |
| SOD1_8.89 | 0.06 | 0.04 | 0.00 | 0.00 |
| SOD1_8.57 | 12.46 | 8.04 | 6.30 | 17.45 |
| DMD_16.30 | 0.14 | 4.80 | 0.93 | 6.86 |
| DMD_16.32 | 0.60 | 0.58 | 0.02 | 1.64 |
| BCL11A_21.1 | 3.28 | 10.46 | 17.16 | 38.28 |
| PCSK9_6.8 | 1.73 | 7.44 | 11.18 | 29.00 |
| B2M_7.37 | 1.48 | 19.34 | 6.92 | 5.26 |
| CD70_26.3 | 0.08 | 3.13 | 8.24 | 12.89 |
| DMD_16.29 | 0.02 | — | — | — |
| DMD_16.31 | 0.11 | — | — | — |
| HTT_5.1 | 0.80 | — | — | — |
| DMPK_20.7 | 0.37 | — | — | — |
| B2M_7.9 | 8.14 | — | — | — |
| CD70_26.5 | 5.92 | — | — | — |
| FSHD_25.1 | 0.27 | — | — | — |
| PMP22_18.22 | 0.07 | — | — | — |
| PTBP1_28.1 | 0.03 | — | — | — |
| VCV000162497_alt | 0.03 | — | — | — |
| VCV000037426_alt | 3.75 | — | — | — |
| VCV000052759_alt | 0.00 | — | — | — |
| VCV000031157_alt | 48.50 | — | — | — |
| VCV000217157_alt | 2.26 | — | — | — |
| VCV000048146_alt | 0.14 | — | — | — |
| VCV000039614_alt | 0.27 | — | — | — |
| VCV000217646_alt | 0.72 | — | — | — |
| VCV000408199_alt | 0.59 | — | — | — |
| VCV000431973_alt | 0.13 | — | — | — |
| VCV000004193_alt | 0.01 | — | — | — |
| VCV000003920_alt | 1.40 | — | — | — |
| VCV000224616_alt | 0.20 | — | — | — |
| VCV000004787_alt | 0.35 | — | — | — |
| VCV000013115_alt | 0.00 | — | — | — |
| VCV000195355_alt | 0.05 | — | — | — |
| VCV000190123_alt | 0.68 | — | — | — |
| VCV000048535_alt | 1.10 | — | — | — |
| VCV000468648_alt | 2.69 | — | — | — |
| VCV000000908_alt | 0.86 | — | — | — |
| VCV000066016_alt | 0.00 | — | — | — |
| VCV000184702_alt | 0.02 | — | — | — |
| VCV000003825_alt | 1.40 | — | — | — |
| VCV000014243_alt | 0.94 | — | — | — |
| VCV000046102_alt | 0.66 | — | — | — |
| VCV000050962_alt | 0.08 | — | — | — |
| VCV000011908_alt | 1.05 | — | — | — |
| VCV000252575_alt | 1.41 | — | — | — |
| SOD1_G93A_alt | 5.13 | — | — | — |
| C9orf72_29.1 | — | 17.85 | — | — |
| VCV000092361_alt | — | 1.82 | — | — |
| VCV000096602_alt | — | 1.22 | — | — |
| DUX4_25.3_alt | — | 5.50 | — | — |
| VCV000012379_alt | — | — | 1.32 | — |
| VCV000067838_alt | — | — | 0.88 | — |
| VCV000246282_alt | — | — | 0.00 | — |
| VCV000000157_alt | — | — | 3.17 | — |
| VCV000550954_alt | — | — | 3.12 | — |
| VCV000189075_alt | — | — | 4.87 | — |
| VCV000006756_alt | — | — | 2.53 | — |
| VCV000100629_alt | — | — | 2.60 | — |
| VCV000372498_alt | — | — | 3.67 | — |
| VCV000002019_alt | — | — | 3.86 | — |
| HTT_slot_1_alt | — | — | 4.53 | — |
| HTT_slot_2_alt | — | — | 0.03 | — |
| HTT_slot_3_alt | — | — | — | 4.21 |

[1202] FIG. 38 is a bar plot showing the average editing efficiency across PAM categories and across CasX protein variants, with the standard error of the mean of two experiments plotted as error bars. These data indicate that both CasX 491 and 515 are specific for the canonical PAM sequence TTC, while other variants of CasX performed more or less efficiently at the PAM sequences tested. In particular, differing amino acids substituted at CasX position 223 were observed to favor different bases at the immediate 5′ position of the PAM nucleotide sequence. The CasX variant with the highest editing activity is listed for each of these four PAM sequences in Table 29. The variant name and amino acid substitution is specified, as well as the fold improvement of editing, relative to CasX 515, for the indicated PAM sequence. These data suggest that the identity of the side chain of the amino acid at this position is critical for PAM recognition. It is likely that each of the four nucleotides is most complementary to a different network of bonds or chemical environment in this region of the CasX protein. These data can be used to engineer maximally-active therapeutic CasX molecules for a target DNA sequence of interest.

[1203] Under the conditions of the experiments, a set of variants of CasX protein 515 was identified that are improved for double-stranded DNA cleavage in human cells at target DNA sequences associated with a PAM of sequence TTC, ATC, CTC, or GTC, supporting that CasX variants with an increased spectrum of PAM specificity, relative to wild-type CasX, can be generated.

TABLE 29
Mutations to CasX 515 that improve cleavage
activity at NTC PAM sequences

| | | | | | Fold- |
|---|---|---|---|---|---|
| CasX | | | | PAM | improvement |
| Protein | Position | Reference | Alternate | Sequence | versus 515 |
| 515 | 223 | G | N/A | TTC | 1.0 |
| 528 | 223 | G | Y | ATC | 6.7 |
| 535 | 223 | G | S | CTC | 5.2 |
| 534 | 223 | G | H | GTC | 3.2 |

### Example 17: The PASS Assay Compares CasX Protein Variants with Improved Editing Efficiency at PAM Sequences of TTC, ATC, CTC, or GTC

[1204] The purpose of the experiment was to compare the genome editing efficiency in human cells utilizing engineered and novel variants of CasX protein 2 (SEQ ID NO: 2). To accomplish this, the HEK293 cell line PASS_V1.00 was treated with wild-type reference CasX protein 2 or engineered variants 119 (SEQ ID NO: 270), 491 (SEQ ID NO: 336), and 515 (SEQ ID NO: 416), or sequence variants of 515, and Next-generation sequencing (NGS) was performed to calculate the percent editing at a variety of spacers and associated target sites.

[1205] Materials and Methods: A multiplexed pooled approach was taken to assay clonal protein variants using the PASS system. Briefly, a pooled HEK cell line was generated and termed PASS_V1.00. Each cell within the pool contained a genome-integrated single-guide RNA (sgRNA; SEQ ID NO: 2238), paired with a specific target site. After transfection of protein-expression constructs, editing at a specific target by a specific spacer could be quantified by NGS. Each guide-target pair was designed to provide data related to activity, specificity, and targetability of the CasX-guide RNP complex.

[1206] Paired spacer-target sequences were synthesized by Twist Biosciences and obtained as an equimolar pool of oligonucleotides. This pool was amplified by PCR and cloned by Golden Gate cloning to generate a final library of plasmids named p66. Each plasmid contained a sgRNA expression element and a target site, along with a GFP expression element and a hygromycin expression element. The sgRNA expression element consisted of a U6 promoter driving transcription of gRNA scaffold 174 (SEQ ID NO: 2238), followed by a spacer sequence which would target the RNP of the guide and CasX variant to the paired target site. 250 possible unique, paired spacer-target synthetic sequences were designed and synthesized. A pool of lentivirus was then produced from this plasmid library using the LentiX production system (Takara Bio USA, Inc.) according to the manufacturer's instructions. The resulting viral preparation was then quantified by qPCR and transduced into a standard HEK293 cell line at a low multiplicity of infection so as to generate single copy integrations. The resulting cell line was then purified by fluorescence-activated cell sorting (FACS) to complete the production of PASS_V1.00. This cell line was then seeded in six-well plate format and treated with either water or was transfected with 2 μg of plasmid p67, delivered by Lipofectamine™ Transfection Reagent (ThermoFisher) according to the manufacturer's instructions. Plasmid p67 contains an EF-1a promoter driving expression of a CasX protein tagged with the SV40 Nuclear Localization Sequence. After five days, treated PASS_V1.00 cells were collected, lysed, and genomic DNA was extracted using a genomic DNA isolation kit (Zymo Research). Genomic DNA was then PCR amplified with custom primers to generate amplicons compatible with Illumina NGS and sequenced on a NextSeq instrument. Sample reads were demultiplexed and filtered for quality. Editing outcome metrics (fraction of reads with indels) were then quantified for each spacer-target synthetic sequence across treated samples.

[1207] To assess the editing efficiency for a molecule, editing outcome metrics for four different PAM sequences were categorized. For TTC PAM target sites, 48 different spacer-target pairs were quantified; for ATC, CTC, and GTC PAM target sites, 14, 22, and 11 individual target sites were quantified, respectively. The editing efficiency was calculated for each of these spacers and was normalized for the background signal by subtracting the editing observed in the water-treated sample.

[1208] Results: FIG. 30 is a violin plot showing the editing efficiency across PAM categories and across CasX protein variants. The editing efficiency of an individual spacer is shown as a dot, and the mean editing efficiency is indicated with a horizontal bar. Cells lipofected with any nuclease displayed higher mean editing at TTC PAM target sites (horizontal bar) than that of the wild-type nuclease Cas 2, except Cas 528 (SEQ ID NO: 428). The relative preference of any given nuclease for the four different PAM sequences is also represented by the violin plots. CasX nucleases 527 (SEQ ID NO: 427), 528 (SEQ ID NO: 428), and 529 (SEQ ID NO: 429) exhibit substantially different PAM preferences than that of the wild-type nuclease CasX 2. These data suggest that certain regions of the CasX amino acid sequence are critical for PAM recognition, and these data can be used to engineer maximally active therapeutic CasX molecules for a target DNA sequence of interest.

[1209] Under the conditions of the experiment, engineered CasX variants 119, 491, and 515, or sequence variants of 515, were identified that are improved for double-stranded DNA cleavage in human cells at target DNA sequences associated with a PAM of sequence TTC, ATC, CTC, or GTC, compared to the WT CasX 2 protein. These data support that CasX variants with an increased spectrum of PAM specificity, relative to wild-type reference CasX, can be generated.

### Example 18: The PASS Assay Compares CasX Protein Variants with Improved Maximum Editing Efficiency at PAM Sequences of TTC, ATC, CTC, or GTC

[1210] The purpose of the experiment was to compare CasX protein variants to determine the maximum editing efficiency at PAM sequences of TTC, ATC, CTC, or GTC for select target nucleic acid sequences. To accomplish this, the HEK293 cell line PASS_V1.00 was treated with engineered CasX protein 491 (SEQ ID NO: 336) or further engineered variants 532 (SEQ ID NO: 432) or 533 (SEQ ID NO: 433), and Next-generation sequencing (NGS) was performed to calculate the percent editing at a variety of spacers and associated target nucleic acid sites.

[1211] Materials and Methods: A multiplexed pooled approach was taken to assay clonal protein variants using the PASS system. Briefly, a pooled HEK cell line was generated and termed PASS_V1.00. Each cell within the pool contained a genome-integrated single-guide RNA (sgRNA), paired with a specific target site. After transfection of protein-expression constructs, editing at a specific target by a specific spacer could be quantified by NGS. Each guide-target pair was designed to provide data related to activity, specificity, and targetability of the CasX-guide RNP complex.

[1212] Paired spacer-target sequences were synthesized by Twist Biosciences and obtained as an equimolar pool of oligonucleotides. This pool was amplified by PCR and cloned by Golden Gate cloning to generate a final library of plasmids named p66. Each plasmid contained a sgRNA expression element and a target site, along with a GFP expression element and a hygromycin expression element. The sgRNA expression element consisted of a U6 promoter driving transcription of gRNA scaffold 174 (SEQ ID NO: 2238), followed by a spacer sequence which would target the RNP of the guide and CasX variant to the paired target site. 250 possible unique, paired spacer-target synthetic sequences were designed and synthesized. A pool of lentivirus was then produced from this plasmid library using the LentiX production system (Takara Bio USA, Inc.) according to the manufacturer's instructions. The resulting viral preparation was then quantified by qPCR and transduced into a standard HEK293 cell line at a low multiplicity of infection so as to generate single copy integrations. The resulting cell line was then purified by fluorescence-activated cell sorting (FACS) to complete the production of PASS_V1.00. This cell line was then seeded in six-well plate format and treated in duplicate with either water or was transfected with 2 μg of plasmid p67, delivered by Lipofectamine™ Transfection Reagent (ThermoFisher) according to the manufacturer's instructions. Plasmid p67 contains an EF-1a promoter driving expression of a CasX protein tagged with the SV40 Nuclear Localization Sequence. After five days, treated PASS_V1.00 cells were collected, lysed, and genomic DNA was extracted using a genomic DNA isolation kit (Zymo Research). Genomic DNA was then PCR amplified with custom primers to generate amplicons compatible with Illumina NGS and sequenced on a NextSeq instrument. Sample reads were demultiplexed and filtered for quality. Editing outcome metrics (fraction of reads with indels) were then quantified for each spacer-target synthetic sequence across treated samples.

[1213] To assess the editing efficiency for a molecule, editing outcome metrics for four different PAM sequences were categorized. For TTC PAM target sites, 48 different spacer-target pairs were quantified; for ATC, CTC, and GTC PAM target sites, 14, 22, and 11 individual target sites were quantified, respectively. The editing efficiency was calculated for each of these spacers and was normalized for the background signal by subtracting the editing observed in the water-treated sample. The average of two biological replicates was then calculated, as well as the Standard Error of the Mean (SEM). Finally, for each category of PAM (TTC, ATC, CTC, or GTC), the average editing efficiency for all spacers was calculated, as well as the propagated SEM.

[1214] Results: FIG. 31 is a bar plot showing the editing efficiency across PAM categories and across CasX protein variants. Cells lipofected with Cas 532 or 533 displayed higher mean editing than CasX 491 at each of the PAM sequences, with the exception of Cas 533 at TTC PAM target sites. These data suggest that CasX variants 532 or 533 may improve editing activity at therapeutic targets of interest.

[1215] Engineered CasX variants 532 and 533 were identified to have improved editing efficiency in human cells compared to CasX 491 when the target DNA sequences were associated with a PAM of sequence TTC, ATC, CTC, or GTC. These data support that CasX variants 532 and 533 may improve the editing efficiency at therapeutic targets of interest compared to CasX 491, particularly for those targets associated with a non-canonical PAM sequence.

### Example 19: The PASS Assay Identifies CasX Protein Variants with Enhanced Editing Activity Relative to CasX 491 or CasX 119

[1216] The purpose of the experiment was to identify variants of CasX with improved editing in human cells, relative to CasX 491 or 119. To accomplish this, the HEK293 cell line PASS_V1.01 was treated with the wild-type CasX protein 2 or with engineered CasX protein variants 119 or 491 (SEQ ID NO: 336) or another CasX protein variant, and Next-generation sequencing (NGS) was performed to calculate the percent editing at a variety of spacers and associated target sites.

[1217] Materials and Methods: A multiplexed pooled approach was taken to assay clonal protein variants using the PASS system. Briefly, a pooled HEK cell line was generated and termed PASS_V1.01. Each cell within the pool contained a genome-integrated single-guide RNA (sgRNA: SEQ ID NO: 2238), paired with a specific target site (listed in Table 30). After transfection of protein-expression constructs, editing at a specific target by a specific spacer could be quantified by NGS. Each guide-target pair was designed to provide data related to activity, specificity, and targetability of the CasX-guide RNP complex.

[1218] Paired spacer-target sequences were synthesized by Twist Biosciences and obtained as an equimolar pool of oligonucleotides. This pool was amplified by PCR and cloned by Golden Gate cloning to generate a final library of plasmids named p77. Each plasmid contained a sgRNA expression element and a target site, along with a GFP expression element. The sgRNA expression element consisted of a U6 promoter driving transcription of gRNA scaffold 174 (SEQ ID NO: 2238), followed by a spacer sequence which would target the RNP of the guide and CasX variant to the paired target site. 250 possible unique, paired spacer-target synthetic sequences were designed and synthesized. A pool of lentivirus was then produced from this plasmid library using the LentiX production system (Takara Bio USA, Inc.) according to the manufacturer's instructions. The resulting viral preparation was then quantified by qPCR and transduced into a standard HEK293 cell line at a low multiplicity of infection so as to generate single copy integrations. The resulting cell line was then purified by fluorescence-activated cell sorting (FACS) to complete the production of PASS_V1.01. This cell line was then seeded in six-well plate format and treated either in duplicate or as a single sample with either water or was transfected with 2 μg of plasmid p67, delivered by Lipofectamine™ Transfection Reagent (ThermoFisher) according to the manufacturer's instructions. Plasmid p67 contains an EF-1a promoter driving expression of a CasX protein tagged with the SV40 Nuclear Localization Sequence as well as a puromycin resistance gene. After one day, cells were transferred to media selective for puromycin resistance (Sigma). After an additional four days, treated PASS_V1.01 cells were collected, lysed, and genomic DNA was extracted using a genomic DNA isolation kit (Zymo Research). Genomic DNA was then PCR amplified with custom primers to generate amplicons compatible with Illumina NGS and sequenced on a NextSeq instrument. Sample reads were demultiplexed and filtered for quality. Editing outcome metrics (fraction of reads with indels) were then quantified for each spacer-target synthetic sequence across treated samples.

[1219] To assess the editing activity of a CasX nuclease at human target sites, 48 TTC PAM target sites were quantified. The average editing efficiency and standard error of the mean for two biological replicates was calculated for each of these spacers where indicated. The average editing efficiency across the 48 spacers also calculated, along with the propagated standard error of the mean, where indicated.

[1220] Results: FIG. 39 is a bar plot showing the average editing efficiency, relative to CasX 491, of select CasX nucleases at 48 different TTC PAM target sites in human cells. The propagated standard error of the mean of two experiments plotted as error bars. These data indicate that both CasX 119 and 491 are substantially more efficient than wild-type CasX 2. In addition, CasX 515 is not significantly different compared to the editing efficiency of CasX 491. Surprisingly, CasX 527 exhibited improved efficiency compared to 491 at TTC PAM sequences (p=0.0000635 by Welch's two-tailed t-test). CasX nuclease 527 was engineered to exhibit improved editing efficiency at PAM sequences of ATC, CTC, or GTC, potentially by stabilizing the R-loop structure of the CasX ribonuclear protein (RNP) with double-stranded DNA target sites with non-canonical PAM sequences. CasX 527 consists of an arginine amino acid inserted at position 26 of CasX 491. This position is physically proximal to the interaction of the CasX PAM recognition loop (amino acid position 223) with the PAM nucleotides of the DNA non-target strand (NTS).

[1221] FIG. 40 diagrams the positions of the PAM recognition loop and the CasX 527 mutation, position 26, on the published CryoEM structure of the homologous reference CasX protein 1 (SEQ ID NO:1; Protein Data Bank Identification Number: 6NY2). It is likely that additional ionic interactions between the inserted arginine and the DNA NTS facilitate improved stability at any of the PAM sequences TTC, ATC, CTC, or GTC, leading to improved overall editing efficiency at these spacers.

[1222] FIG. 41 is a violin plot comparing the editing efficiency of CasX 2 and CasX 527 to select variants of CasX 515 at 48 TTC PAM spacers, with the median editing efficiency represented as a horizontal bar. As discussed above, CasX 527 was previously observed to have editing efficiency equal to or better than CasX 491, and several novel CasX variants were here observed to have further improved editing efficiency relative to CasX 527. Unexpectedly, the editing rates for CasX 583 were particularly uniform and high. This may be the result of a large improvement in the stability of the R-loop structure, such that editing variation typically observed between spacers was mostly overcome. Supporting this hypothesis, CasX 583 differs from CasX 515 by the substitution of a hydrophobic leucine at position 168 for a positively charged lysine in the non-target strand binding domain (NTSB) of the protein, which may facilitate additional ionic bonds to the NTS of the target DNA. This region is unstructured in the CryoEM structure discussed above and the NTSB domain has been labeled for clarity. Table 30 lists the editing efficiency for 48 TTC PAM spacers when targeted with CasX protein variant 527 or 583, demonstrating the enhanced editing efficiency of the CasX 583 at the majority of the targets, under the conditions of the assay. The spacer name and associated PAM sequence are indicated.

[1223] FIG. 42 is a bar plot showing the average editing efficiency, relative to CasX 491, of select CasX nucleases at 48 different TTC PAM target sites in human cells. The propagated standard error of the mean of two experiments plotted as error bars. The grey dashed line indicates the editing activity of CasX 119. These data indicate that CasX variants from 429 to 458 exhibit variable editing efficiency relative to CasX 119, and in some cases exhibit improved editing efficiency relative to CasX 119, which edits at 70.8% relative to CasX 491. In particular, CasX 450 was substantially more efficient than CasX 119, editing at 95.9% relative to CasX 491, and consists of four substitution mutations relative to the CasX 119 sequence. These four substitution mutations are as follows: D732N, E385P, Y857R, I658V. Importantly, CasX 449 consists of the same sequence, minus the substitution of I658V, and is considerably less efficient, editing at only 58.1% relative to CasX 491. This comparison indicates that this mutation is of critical importance for the increase in activity. These data demonstrate that improved editing activity is achievable when combinations of substitution mutations are made to CasX 119. Notably, these enhancements to activity are separate from the enhancements observed to arise from domain exchange between homologous CasX protein sequences. In particular, CasX 484 differs from CasX 491 only by replacement of the CasX 2 domains NTSB and Helical 1b with those found CasX 1, with a corresponding increase in activity from 62.0% to 100.0%. These data show that CasX 119 nuclease activity can be enhanced by combinations of individual substitution mutations or by domain exchange with homologous CasX proteins.

[1224] Under the conditions of the experiments, a set of variants of CasX protein 491 or 515 were identified that are improved for double-stranded DNA cleavage in human cells at target DNA sequences associated with a PAM of sequence TTC, and provide evidence of specific locations or combinations of locations for mutations that could be used to further engineer CasX variants molecules with enhanced activity for a target DNA sequence of interest.

TABLE 30
Percent editing of CasX 527 or CasX 583 at 48
spacers associated with PAM sequences of TTC

| | CasX 527 Percent | CasX 583 Percent |
|---|---|---|
| Spacer Name | Editing | Editing |
| Rho_11.24 | 26.0 | 38.9 |
| SOD1_8.89 | 25.9 | 38.9 |
| SOD1_8.57 | 42.4 | 22.2 |
| DMD_16.29 | 5.0 | 0.0 |
| DMD_16.30 | 33.0 | 62.5 |
| DMD_16.31 | 44.1 | 70.3 |
| DMD_16.32 | 19.1 | 66.3 |
| BCL11A_21.1 | 53.1 | 74.0 |
| PCSK9_6.8 | 25.9 | 57.9 |
| HTT_5.1 | 45.3 | 74.6 |
| DMPK_20.7 | 19.9 | 56.3 |
| B2M_7.9 | 53.9 | 72.7 |
| B2M_7.37 | 32.5 | 59.9 |
| CD70_26.5 | 37.7 | 66.0 |
| CD70_26.3 | 27.2 | 78.0 |
| FSHD_25.1 | 19.4 | 0.0 |
| PMP22_18.22 | 31.9 | 66.4 |
| PTBP1_28.1 | 17.4 | 0.0 |
| Rho_11.2 | 32.4 | 59.5 |
| VCV000162497_alt | 22.6 | 27.4 |
| VCV000037426_alt | 34.7 | 34.7 |
| VCV000052759_alt | 43.8 | 84.8 |
| VCV000031157_alt | 27.5 | 0.0 |
| VCV000217157_alt | 17.7 | 21.4 |
| VCV000048146_alt | 36.8 | 53.3 |
| VCV000039614_alt | 42.9 | 73.1 |
| VCV000217646_alt | 39.7 | 81.8 |
| VCV000408199_alt | 28.5 | 64.2 |
| VCV000431973_alt | 40.6 | 62.2 |
| VCV000004193_alt | 18.7 | 15.8 |
| VCV000003920_alt | 31.1 | 68.1 |
| VCV000224616_alt | 20.6 | 58.9 |
| VCV000004787_alt | 37.9 | 61.7 |
| VCV000013115_alt | 0.0 | 100.0 |
| VCV000195355_alt | 45.3 | 83.3 |
| VCV000190123_alt | 49.1 | 78.1 |
| VCV000048535_alt | 32.9 | 61.2 |
| VCV000468648_alt | 38.4 | 77.9 |
| VCV000000908_alt | 30.7 | 64.3 |
| VCV000066016_alt | 0.0 | 0.0 |
| VCV000184702_alt | 41.8 | 8.1 |
| VCV000003825_alt | 30.2 | 55.7 |
| VCV000014243_alt | 36.2 | 77.9 |
| VCV000046102_alt | 47.3 | 74.6 |
| VCV000050962_alt | 24.9 | 67.4 |
| VCV000011908_alt | 30.0 | 64.8 |
| VCV000252575_alt | 17.9 | 38.3 |
| SOD1_G93A_alt | 37.5 | 80.2 |

### Example 20: The PASS Assay Identifies CasX Protein Variants with Enhanced Specificity Relative to CasX 491

[1225] The purpose of the experiment was to identify variants of CasX with improved specificity for cleavage at on-target versus off-target sites in human cells. To accomplish this, the HEK293 cell line PASS_V1.01 was treated with the wild-type CasX protein 2 or with engineered CasX protein variants 119 or 491 (SEQ ID NO: 336) or another CasX protein variant, along with a single-guide RNA (sgRNA; SEQ ID NO: 2238), and Next-generation sequencing (NGS) was performed to calculate the percent editing at a variety of spacers and associated target sites.

[1226] Materials and Methods: A multiplexed pooled approach was taken to assay clonal protein variants using the PASS system, as described in Example 19.

[1227] To assess the editing activity as well as specificity of a CasX nuclease at human target sites, two sets of target sites were quantified. First, 48 TTC PAM target sites were quantified, and the average editing efficiency and standard error of the mean for two biological replicates was calculated for each of these spacers. The average editing efficiency across the 48 spacers was also calculated, along with the propagated standard error of the mean. Second, 28 sets of two TTC PAM spacer-target site pairs were quantified. Each set of spacer-target pairs consisted of a fixed spacer sequence and two differing target sites. The two target sites differed by a single nucleotide mismatch at one of the twenty positions of the target site. One target site (the on-target spacer-target pair) was perfectly complementary to the spacer sequence, while the other (the off-target spacer-target pair) consists of a mismatch between the RNA of the spacer and the DNA target strand. Average editing efficiency and standard error of the mean for two biological replicates was calculated for each of these spacers. The ratio of editing efficiency between the off-target and the on-target sites was calculated, as well as the propagated standard error of the mean, for each of these 28 sets of target sites. This metric is defined as the Specificity Ratio. Finally, the average Specificity Ratio across the 28 sets of target sites was calculated, as well as the propagated standard error of the mean.

[1228] Results: FIG. 43 is a bar plot showing the average editing efficiency relative to CasX 491 as well as the average Specificity ratio of select CasX nucleases. The propagated standard error of the mean of two experiments plotted as error bars. These data indicate that both CasX 119 and 491 are substantially more efficient than wild-type CasX 2, and that CasX 119 remains specific for single nucleotide mismatches within the spacer (low Specificity Ratio) compared to CasX 2 (average Specificity Ratio of 0.171 for CasX 2, versus 0.182 for CasX 119). In contrast, CasX 491 has lost a considerable amount of specificity for single nucleotide mismatches under these conditions (average Specificity Ratio of 0.446). An additional mutation to CasX 491 (insertion of proline at position 793) to generate CasX 515 slightly improves the specificity of the molecule, although this result is not statistically significant. Furthermore, an insertion of an arginine at position 26 of CasX 491 to generate CasX 527 significantly and substantially worsens the specificity of the molecule (average Specificity Ratio of 0.839). Importantly however, additional single mutations to CasX 515 further improve the specificity of the molecule. CasX 535, 537, 542, 543, and 544 all significantly improve the specificity. CasX 544 improves the specificity the most, to an average Specificity Ratio of 0.183, which is not significantly different from that of the wild-type CasX 2. At the same time, CasX 544 maintains an average editing efficiency of 97.7% compared to that of CasX 491 and is not significantly different. These data demonstrate that single mutations made to CasX 491 or 515 can alter either the activity or the specificity, or both, of the nuclease when editing targeted DNA sequences in human cells. FIG. 68 is a flow-chart illustrating the qualitative relationship between tested combinations of mutations and their effect on both activity and specificity. Table 31 quantifies the average percent editing of CasX 491 at 28 sets of on-target or off-target spacer-target pairs, illustrating the average ratio of on-target versus off-target editing efficiency. Table 32 quantifies the average editing activity of select CasX variants relative to CasX 2 or CasX variant 491, as well as the average Specificity Ratio for each variant as the absolute value between zero and one. In all cases, the engineered variants showed improved editing efficiency compared to reference CasX 2 (SEQ ID NO: 2), with 4-fold to nearly 7-fold more editing, under the conditions of the assay, while CasX 527 (SEQ ID NO: 427) and 532 (SEQ ID NO: 432) showed improvements relative to CasX 491 (SEQ ID NO: 336). CasX 542 (SEQ ID NO: 442), 543 (SEQ ID NO: 443), and 544 (SEQ ID NO: 444) were essentially as active as CasX 491, but retained specificity comparable to reference CasX 2.

[1229] Under the conditions of the experiments, a set of variants of CasX protein 491 or 515 were identified that are improved for double-stranded DNA cleavage in human cells at target DNA sequences associated with a PAM of sequence TTC. In addition, the specificity of these protein variants was quantified by measuring editing at on-target versus off-target sites. These data can be used to engineer maximally active and maximally specific therapeutic CasX variant molecules for a target DNA sequence of interest.

TABLE 31
Average percent editing of CasX 491 at 28 sets
of on-target or off-target spacer-target pairs

| | CasX 491 Average | CasX 491 Average |
|---|---|---|
| | On-target Percent | Off-target Percent |
| Spacer Name | Editing | Editing |
| VCV000162497_alt | 15.4 | 2.0 |
| VCV000037426_alt | 21.9 | 0.1 |
| VCV000052759_alt | 35.4 | 25.8 |
| VCV000031157_alt | 12.8 | 5.4 |
| VCV000217157_alt | 11.7 | 6.9 |
| VCV000048146_alt | 21.8 | 0.3 |
| VCV000039614_alt | 38.0 | 13.3 |
| VCV000217646_alt | 38.2 | 9.2 |
| VCV000408199_alt | 31.2 | 47.5 |
| VCV000431973_alt | 35.7 | 0.0 |
| VCV000004193_alt | 7.4 | 0.2 |
| VCV000003920_alt | 32.0 | 24.2 |
| VCV000224616_alt | 33.1 | 30.7 |
| VCV000004787_alt | 41.8 | 32.7 |
| VCV000013115_alt | 16.2 | 43.7 |
| VCV000195355_alt | 42.6 | 10.6 |
| VCV000190123_alt | 39.1 | 6.0 |
| VCV000048535_alt | 31.9 | 6.6 |
| VCV000468648_alt | 35.7 | 35.1 |
| VCV000000908_alt | 45.2 | 10.6 |
| VCV000066016_alt | 40.6 | 1.8 |
| VCV000184702_alt | 16.8 | 0.0 |
| VCV000003825_alt | 29.9 | 27.1 |
| VCV000014243_alt | 37.0 | 5.9 |
| VCV000046102_alt | 38.1 | 17.0 |
| VCV000050962_alt | 31.6 | 8.5 |
| VCV000011908_alt | 43.5 | 7.3 |
| VCV000252575_alt | 21.3 | 44.1 |

TABLE 32
Activity and specificity of CasX proteins

| | Average editing | Average editing | |
|---|---|---|---|
| | efficiency relative | efficiency relative | Average |
| CasX Protein | to CasX 2 (%) | to CasX 491 (%) | Specificity Ratio |
| 2 | 100 | 17 | 0.17 |
| 119 | 429 | 71 | 0.18 |
| 491 | 606 | 100 | 0.45 |
| 515 | 602 | 99 | 0.37 |
| 527 | 694 | 115 | 0.84 |
| 532 | 677 | 112 | 0.63 |
| 535 | 541 | 89 | 0.27 |
| 536 | 513 | 85 | 0.29 |
| 537 | 470 | 78 | 0.25 |
| 542 | 575 | 95 | 0.19 |
| 543 | 539 | 89 | 0.17 |
| 544 | 592 | 98 | 0.18 |

### Example 21: Improved Guide RNA Variants Demonstrate Enhanced On-Target Activity at Mouse and Human RHO Exon 1 Loci In Vitro

[1230] Experiments were conducted to identify novel engineered guide RNA variants with increased activity at different genomic targets, including the therapeutically-relevant mouse and human Rho exon 1. Previous assays identified many different “hotspot” regions (e.g., stem loop) within the scaffold sequences holding the potential to significantly increase editing efficiency as well as specificity (sequences in Table 33). Additionally, screens were conducted to identify scaffold variants that would increase the overall activity of our CRISPR system in an AAV vector across multiple different PAM-spacer combinations, without triggering off-target or non-specific editing. Achieving increased editing efficiency compared to current benchmark vectors would allow reduced viral vector doses to be used in in vivo studies, improving the safety of AAV-mediated CasX-guide systems.

### Materials and Methods:

[1231] New CasX variant sequences and gRNA scaffold variants were inserted into an AAV transgene construct for plasmid and viral vector validation. We conceptually broke up the AAV transgene between ITRs into different parts, which consisted of our therapeutic cargo (CasX and gRNA variants+spacer) and accessory elements (e.g., promoters, NLS, poly(A)) relevant to expression in mammalian cells. Each part in the AAV genome was separated by restriction enzyme sites to allow for modular cloning. Parts were ordered as gene fragments from Twist, were PCR amplified and digested with corresponding restriction enzymes, cleaned, then ligated into a vector digested with the same enzymes. New AAV constructs were then transformed into chemically competent E. coli (Turbos or Stbl3s), which were plated on Kanamycin LB-Agar plates following recovery at 37° C. for 1 hour. Single colonies were picked, mini-prepped, and Sanger-sequenced. Sequence-verified constructs were then cloned into a BbsI Golden-Gate assembly with spacer 12.7 (targeting tdTomato: CTGCATTCTAGTTGTGGTTT, SEQ ID NO: 194). Spacers were made by annealing two oligos and diluting in water. The transformation and miniprep protocols were then repeated and spacer-cloned vectors were sequence-verified again. Validated constructs were maxi-prepped. To assess the quality ofmaxi-preps, constructs were processed in two separate digests with XmaJ (which cuts at several sites in each of the ITRs) and XhoJ, which cuts once in the AAV genome. These digests and the uncut construct were then run on a 1% Agarose gel and imaged on a ChemiDoc. If the plasmid was >90% supercoiled, was the correct size, and the ITRs were intact, the construct moved on to be tested via nucleofection and subsequently used AAV vector production.

TABLE 33
Guide sequences cloned into p59.491.U6.X.Y. plasmids.

| Guide | Spacer | | |
|---|---|---|---|
| Construct | Sequence | Guide Sequence | Guide + Spacer Sequence |
| 174.12.7 | CTGCATTCTA | ACTGGCGCTTTTATCTGATTACT | ACTGGCGCTTTTATCTGATTACTTTGAGAG |
| | GTTGTGGTTT | TTGAGAGCCATCACCAGCGACT | CCATCACCAGCGACTATGTCGTAGTGGGT |
| | (SEQ ID NO: | ATGTCGTAGTGGGTAAAGCTCC | AAAGCTCCCTCTTCGGAGGGAGCATCAAA |
| | 194) | CTCTTCGGAGGGAGCATCAAAG | GCTGCATTCTAGTTGTGGTTT |
| | | (SEQ ID NO: 702) | (SEQ ID NO: 727) |
| 229.12.7 | CTGCATTCTA | ACTGGCACTTTTATCTGATTACT | ACTGGCACTTTTATCTGATTACTTTGAGAG |
| | GTTGTGGTT | TTGAGAGCCATCACCAGCGACT | CCATCACCAGCGACTATGTCGTATGGGTA |
| | (SEQ ID NO: | ATGTCGTATGGGTAAAGCGCTT | AAGCGCTTACGGACTTCGGTCCGTAAGAA |
| | 195) | ACGGACTTCGGTCCGTAAGAAG | GCATCAAAGCTGCATTCTAGTTGTGGTTT |
| | | CATCAAAG (SEQ ID NO: 703) | (SEQ ID NO: 728) |
| 230.12.7 | CTGCATTCTA | ACTGGCACTTCTATCTGATTACT | ACTGGCACTTCTATCTGATTACTCTGAGAG |
| | GTTGTGGTT | CTGAGAGCCATCACCAGCGACT | CCATCACCAGCGACTATGTCGTATGGGTA |
| | (SEQ ID NO: | ATGTCGTATGGGTAAAGCGCTT | AAGCGCTTACGGACTTCGGTCCGTAAGAA |
| | 195) | ACGGACTTCGGTCCGTAAGAAG | GCATCAGAGCTGCATTCTAGTTGTGGTTT |
| | | CATCAGA (SEQ ID NO: 704) | (SEQ ID NO: 729) |
| 231.12.7 | CTGCATTCTA | ACTGGCGCTTCTATCTGATTACT | ACTGGCGCTTCTATCTGATTACTCTGAGAG |
| | GTTGTGGTT | CTGAGAGCCATCACCAGCGACT | CCATCACCAGCGACTATGTCGTATGGGTA |
| | (SEQ ID NO: | ATGTCGTATGGGTAAAGCCGCT | AAGCCGCTTACGGACTTCGGTCCGTAAGA |
| | 195) | TACGGACTTCGGTCCGTAAGAG | GGCATCAGAGCTGCATTCTAGTTGTGGTTT |
| | | GCATCAGAG (SEQ ID NO: 705) | (SEQ ID NO: 730) |
| 232.12.7 | CTGCATTCTA | ACTGGCACTTCTATCTGATTACT | ACTGGCACTTCTATCTGATTACTCTGAGCG |
| | GTTGTGGTT | CTGAGCGCCATCACCAGCGACT | CCATCACCAGCGACTATGTCGTATGGGTA |
| | (SEQ ID NO: | ATGTCGTATGGGTAAAGCCGCT | AAGCCGCTTACGGACTTCGGTCCGTAAGA |
| | 195) | TACGGACTTCGGTCCGTAAGAG | GGCATCAGAGCTGCATTCTAGTTGTGGTTT |
| | | GCATCAGAG (SEQ ID NO: 706) | (SEQ ID NO: 731) |
| 233.12.7 | CTGCATTCTA | ACTGGCGCTTCTATCTGATTACT | ACTGGCGCTTCTATCTGATTACTCTGAGCG |
| | GTTGTGGTT | CTGAGCGCCATCACCAGCGACT | CCATCACCAGCGACTATGTCGTATGGGTA |
| | (SEQ ID NO: | ATGTCGTATGGGTAAAGCCGCT | AAGCCGCTTACGGACTTCGGTCCGTAAGA |
| | 195) | TACGGACTTCGGTCCGTAAGAG | GGCATCAGAGCTGCATTCTAGTTGTGGTTT |
| | | GCATCAGAG (SEQ ID NO: 707) | (SEQ ID NO: 732) |
| 234.12.7 | CTGCATTCTA | ACTGGCGCTTCTATCTGATTACT | ACTGGCGCTTCTATCTGATTACTCTGAGCG |
| | GTTGTGGTT | CTGAGCGCCATCACCAGCGACT | CCATCACCAGCGACTATGTCGTATGGGTA |
| | (SEQ ID NO: | ATGTCGTATGGGTAAAGCGCCT | AAGCGCCTTACGGACTTCGGTCCGTAAGG |
| | 195) | TACGGACTTCGGTCCGTAAGGA | AGCATCAGAGCTGCATTCTAGTTGTGGTTT |
| | | GCATCAGAG (SEQ ID NO: 708) | (SEQ ID NO: 733) |
| 235.12.7 | CTGCATTCTA | ACTGGCGCTTCTATCTGATTACT | ACTGGCGCTTCTATCTGATTACTCTGAGCG |
| | GTTGTGGTT | CTGAGCGCCATCACCAGCGACT | CCATCACCAGCGACTATGTCGTAGTGGGT |
| | (SEQ ID NO: | ATGTCGTAGTGGGTAAAGCCGC | AAAGCCGCTTACGGACTTCGGTCCGTAAG |
| | 195) | TTACGGACTTCGGTCCGTAAGA | AGGCATCAGAGCTGCATTCTAGTTGTGGT |
| | | GGCATCAGAG (SEQ ID NO: 709) | T (SEQ ID NO: 734) |
| 236.12.7 | CTGCATTCTA | ACGGGACTTTCTATCTGATTACT | ACGGGACTTTCTATCTGATTACTCTGAAGT |
| | GTTGTGGTT | CTGAAGTCCCTCACCAGCGACT | CCCTCACCAGCGACTATGTCGTATGGGTA |
| | (SEQ ID NO: | ATGTCGTATGGGTAAAGCCGCT | AAGCCGCTTACGGACTTCGGTCCGTAAGA |
| | 195) | TACGGACTTCGGTCCGTAAGAG | GGCATCAGAGCTGCATTCTAGTTGTGGTT |
| | | GCATCAGAG (SEQ ID NO: 710) | (SEQ ID NO: 735) |
| 237.12.7 | CTGCATTCTA | ACCTGTAGTTCTATCTGATTACT | ACCTGTAGTTCTATCTGATTACTCTGACTA |
| | GTTGTGGTT | CTGACTACAGTCACCAGCGACT | CAGTCACCAGCGACTATGTCGTATGGGTA |
| | (SEQ ID NO: | ATGTCGTATGGGTAAAGCCGCT | AAGCCGCTTACGGACTTCGGTCCGTAAGA |
| | 195) | TACGGACTTCGGTCCGTAAGAG | GGCATCAGAGCTGCATTCTAGTTGTGGTT |
| | | GCATCAGAG (SEQ ID NO: 711) | (SEQ ID NO: 736) |
| 174.11.30 | AAGGGGCT | ACTGGCGCTTTTATCTGATTACT | ACTGGCGCTTTTATCTGATTACTTTGAGAG |
| | CCGCACCA | TTGAGAGCCATCACCAGCGACT | CCATCACCAGCGACTATGTCGTAGTGGGT |
| | CGCC (SEQ | ATGTCGTAGTGGGTAAAGCTCC | AAAGCTCCCTCTTCGGAGGGAGCATCAAA |
| | ID NO: 204) | CTCTTCGGAGGGAGCATCAAAG | GAAGGGGCTCCGCACCACGCC (SEQ ID |
| | | (SEQ ID NO: 702) | NO: 737) |
| 229.11.30 | AAGGGGCT | ACTGGCACTTTTATCTGATTACT | ACTGGCACTTTTATCTGATTACTTTGAGAG |
| | CCGCACCA | TTGAGAGCCATCACCAGCGACT | CCATCACCAGCGACTATGTCGTATGGGTA |
| | CGCC (SEQ | ATGTCGTATGGGTAAAGCGCTT | AAGCGCTTACGGACTTCGGTCCGTAAGAA |
| | ID NO: 204) | ACGGACTTCGGTCCGTAAGAAG | GCATCAAAGAAGGGGCTCCGCACCACGCC |
| | | CATCAAAG (SEQ ID NO: 703) | (SEQ ID NO: 738) |
| 230.11.30 | AAGGGGCT | ACTGGCACTTCTATCTGATTACT | ACTGGCACTTCTATCTGATTACTCTGAGAG |
| | CCGCACCA | CTGAGAGCCATCACCAGCGACT | CCATCACCAGCGACTATGTCGTATGGGTA |
| | CGCC (SEQ | ATGTCGTATGGGTAAAGCGCTT | AAGCGCTTACGGACTTCGGTCCGTAAGAA |
| | ID NO: 204) | ACGGACTTCGGTCCGTAAGAAG | GCATCAGAAAGGGGCTCCGCACCACGCC |
| | | CATCAGA (SEQ ID NO: 704) | (SEQ ID NO: 739) |
| 231.11.30 | AAGGGGCT | ACTGGCGCTTCTATCTGATTACT | ACTGGCGCTTCTATCTGATTACTCTGAGAG |
| | CCGCACCA | CTGAGAGCCATCACCAGCGACT | CCATCACCAGCGACTATGTCGTATGGGTA |
| | CGCC (SEQ | ATGTCGTATGGGTAAAGCCGCT | AAGCCGCTTACGGACTTCGGTCCGTAAGA |
| | ID NO: 204) | TACGGACTTCGGTCCGTAAGAG | GGCATCAGAGAAGGGGCTCCGCACCACGC |
| | | GCATCAGAG (SEQ ID NO: 705) | C (SEQ ID NO: 740) |
| 232.11.30 | AAGGGGCT | ACTGGCACTTCTATCTGATTACT | ACTGGCACTTCTATCTGATTACTCTGAGCG |
| | CCGCACCA | CTGAGCGCCATCACCAGCGACT | CCATCACCAGCGACTATGTCGTATGGGTA |
| | CGCC (SEQ | ATGTCGTATGGGTAAAGCCGCT | AAGCCGCTTACGGACTTCGGTCCGTAAGA |
| | ID NO: 204) | TACGGACTTCGGTCCGTAAGAG | GGCATCAGAGAAGGGGCTCCGCACCACGC |
| | | GCATCAGAG (SEQ ID NO: 706) | C (SEQ ID NO: 741) |
| 233.11.30 | AAGGGGCT | ACTGGCGCTTCTATCTGATTACT | ACTGGCGCTTCTATCTGATTACTCTGAGCG |
| | CCGCACCA | CTGAGCGCCATCACCAGCGACT | CCATCACCAGCGACTATGTCGTATGGGTA |
| | CGCC (SEQ | ATGTCGTATGGGTAAAGCCGCT | AAGCCGCTTACGGACTTCGGTCCGTAAGA |
| | ID NO: 204) | TACGGACTTCGGTCCGTAAGAG | GGCATCAGAGAAGGGGCTCCGCACCACGC |
| | | GCATCAGAG (SEQ ID NO: 707) | C (SEQ ID NO: 742) |
| 234.11.30 | AAGGGGCT | ACTGGCGCTTCTATCTGATTACT | ACTGGCGCTTCTATCTGATTACTCTGAGCG |
| | CCGCACCA | CTGAGCGCCATCACCAGCGACT | CCATCACCAGCGACTATGTCGTATGGGTA |
| | CGCC (SEQ | ATGTCGTATGGGTAAAGCGCCT | AAGCGCCTTACGGACTTCGGTCCGTAAGG |
| | ID NO: 204) | TACGGACTTCGGTCCGTAAGGA | AGCATCAGAGAAGGGGCTCCGCACCACGC |
| | | GCATCAGAG (SEQ ID NO: 708) | C (SEQ ID NO: 743) |
| 235.11.30 | AAGGGGCT | ACTGGCGCTTCTATCTGATTACT | ACTGGCGCTTCTATCTGATTACTCTGAGCG |
| | CCGCACCA | CTGAGCGCCATCACCAGCGACT | CCATCACCAGCGACTATGTCGTAGTGGGT |
| | CGCC (SEQ | ATGTCGTAGTGGGTAAAGCCGC | AAAGCCGCTTACGGACTTCGGTCCGTAAG |
| | ID NO: 204) | TTACGGACTTCGGTCCGTAAGA | AGGCATCAGAGAAGGGGCTCCGCACCACG |
| | | GGCATCAGAG (SEQ ID NO: 709) | CC (SEQ ID NO: 744) |
| 236.11.30 | AAGGGGCT | ACGGGACTTTCTATCTGATTACT | ACGGGACTTTCTATCTGATTACTCTGAAGT |
| | CCGCACCA | CTGAAGTCCCTCACCAGCGACT | CCCTCACCAGCGACTATGTCGTATGGGTA |
| | CGCC (SEQ | ATGTCGTATGGGTAAAGCCGCT | AAGCCGCTTACGGACTTCGGTCCGTAAGA |
| | ID NO: 204) | TACGGACTTCGGTCCGTAAGAG | GGCATCAGAGAAGGGGCTCCGCACCACGC |
| | | GCATCAGAG (SEQ ID NO: 710) | C (SEQ ID NO: 745) |
| 237.11.30 | AAGGGGCT | ACCTGTAGTTCTATCTGATTACT | ACCTGTAGTTCTATCTGATTACTCTGACTA |
| | CCGCACCA | CTGACTACAGTCACCAGCGACT | CAGTCACCAGCGACTATGTCGTATGGGTA |
| | CGCC (SEQ | ATGTCGTATGGGTAAAGCCGCT | AAGCCGCTTACGGACTTCGGTCCGTAAGA |
| | ID NO: 204) | TACGGACTTCGGTCCGTAAGAG | GGCATCAGAGAAGGGGCTCCGCACCACGC |
| | | GCATCAGAG (SEQ ID NO: 711) | C (SEQ ID NO: 746) |
| 174.11.31 | AAGTGGCTC | ACTGGCGCTTTTATCTGATTACT | ACTGGCGCTTTTATCTGATTACTTTGAGAG |
| | CGCACCACG | TTGAGAGCCATCACCAGCGACT | CCATCACCAGCGACTATGTCGTAgTGGGTA |
| | CC | ATGTCGTAgTGGGTAAAGCTCC | AAGCTCCCTCTTCGGAGGGAGCATCAAAG |
| | (SEQ ID NO: | CTCTTCGGAGGGAGCATCAAAG | AAGTGGCTCCGCACCACGCC |
| | 215) | (SEQ ID NO: 702) | (SEQ ID NO: 747) |
| 235.11.31 | AAGTGGCTC | ACTGGCGCTTCTATCTGATTACT | ACTGGCGCTTCTATCTGATTACTCTGAGCG |
| | CGCACCACG | CTGAGCGCCATCACCAGCGACT | CCATCACCAGCGACTATGTCGTAGTGGGT |
| | CC (SEQ ID | ATGTCGTAGTGGGTAAAGCCGC | AAAGCCGCTTACGGACTTCGGTCCGTAAG |
| | NO: 215) | TTACGGACTTCGGTCCGTAAGA | AGGCATCAGAGAAGTGGCTCCGCACCACG |
| | | GGCATCAGAG (SEQ ID NO: 709) | CC (SEQ ID NO: 748) |
| 174.11.1 | AAGGGGCTG | ACTGGCGCTTTTATCTGATTACT | ACTGGCGCTTTTATCTGATTACTTTGAGAG |
| | CGTACCACA | TTGAGAGCCATCACCAGCGACT | CCATCACCAGCGACTATGTCGTAGTGGGT |
| | CC (SEQ ID | ATGTCGTAGTGGGTAAAGCTCC | AAAGCTCCCTCTTCGGAGGGAGCATCAAA |
| | NO: 216) | CTCTTCGGAGGGAGCATCAAAG | GAAGGGGCTGCGTACCACACC (SEQ ID |
| | | (SEQ ID NO: 702) | NO: 749) |
| 235.11.1 | AAGGGGCTG | ACTGGCGCTTCTATCTGATTACT | ACTGGCGCTTCTATCTGATTACTCTGAGCG |
| | CGTACCACA | CTGAGCGCCATCACCAGCGACT | CCATCACCAGCGACTATGTCGTAGTGGGT |
| | CC (SEQ ID | ATGTCGTAGTGGGTAAAGCCGC | AAAGCCGCTTACGGACTTCGGTCCGTAAG |
| | NO: 216) | TTACGGACTTCGGTCCGTAAGA | AGGCATCAGAGAAGGGGCTGCGTACCA |
| | | GGCATCAGAG (SEQ ID NO: 709) | CACC (SEQ ID NO: 750) |
| 235.NT | GGGTCTTCG | ACTGGCGCTTCTATCTGATTACT | ACTGGCGCTTCTATCTGATTACTCTGAGCG |
| | AGAAGACC | CTGAGCGCCATCACCAGCGACT | CCATCACCAGCGACTATGTCGTAGTGGGT |
| | C (SEQ ID | ATGTCGTAGTGGGTAAAGCCGC | AAAGCCGCTTACGGACTTCGGTCCGTAAG |
| | NO: 218) | TTACGGACTTCGGTCCGTAAGA | AGGCATCAGAGGGGTCTTCGAGAAGAC |
| | | GGCATCAGAG (SEQ ID NO: 709) | CC (SEQ ID NO: 751) |

(X = guide; Y = spacer)

### Reporter Cell Lines:

[1232] An immortalized neural progenitor cell line isolated from the Ai9-tdTomato was cultured in suspension in pre-equilibrated mNPC medium (DMEM/F12 with GlutaMax, 10 mM HEPES, 1X MEM Non-Essential Amino Acids, 1X Penicillin/Streptomycin, 1:1000 2-mercaptoethanol, 1X B-27 supplement, minus vitamin A, 1X N2 with supplemented growth factors bFGF and EGF). Prior to testing, cells were lifted using accutase, with gentle resuspension, monitoring for complete separation of the neurospheres. Cells were then quenched with media, spun down and resuspended in fresh media. Cells were counted and directly used for nucleofection or 10,000 cells were incubated in a 96-well plate coated with PLF (1X Poly-DL-ornithine hydrobromide, 10 mg/mL in sterile diH20, 1X Laminin, and 1X Fibronectin), 2 days prior to AAV transduction.

[1233] A HEK293T dual reporter cell line was generated by knocking into HEK293T cells two transgene cassettes that constitutively expressed exon 1 of the human RHO gene linked to GFP and exon 1 of the human P23H.RHO gene linked to mscarlet. The modified cells were expanded by serial passage every 3-5 days and maintained in Fibroblast (FB) medium, consisting of Dulbecco's Modified Eagle Medium (DMEM; Corning Cellgro, #10-013-CV) supplemented with 10% fetal bovine serum (FBS; Seradigm, #1500-500), and 100 Units/mL penicillin and 100 mg/mL streptomycin (100x-Pen-Strep; GIBCO #15140-122), and can additionally include sodium pyruvate (100x, ThermoFisher #11360070), non-essential amino acids (100x ThermoFisher #11140050), HEPES buffer (100x ThermoFisher #15630080), and 2-mercaptoethanol (1000x ThermoFisher #21985023). The cells were incubated at 37° C. and 5% CO₂. After 1-2 weeks, GFP+/mscarlet+cells were bulk-sorted into FB medium. The reporter lines were expanded by serial passage every 3-5 days and maintained in FB medium in an incubator at 37° C. and 5% CO₂. Reporter clones were generated by a limiting dilution method. The clonal lines were characterized via flow cytometry, genomic sequencing, and functional modification of the RHO locus using a previously validated RHO targeting CasX molecule. The optimal reporter lines were identified as ones that i) had a single copies of WTRHO.GFP and mutRHO.mscarlet correctly integrated per cell, ii) maintained doubling times equivalent to unmodified cells, and iii) resulted in reduction in GFP and mscarlet fluorescence upon disruption of the RHO gene when assayed using the methods described below.

### Nucleofection:

[1234] AAV cis-plasmids driving expression of the CasX-scaffold-guide system were nucleofected in mNPCs using the Lonza P3 Primary Cell 96-well Nucleofector Kit. For the ARPE-19 line, the Lonza SF solution and supplement was used. Plasmids were diluted to concentrations of 200 ng/l, 100 ng/L. 5 μL of DNA per construct was added to the P3 or SF solution containing 200,000 tdTomato mNPCs or ARPE-19 cells respectively. The combined solution was nucleofected using a Lonza 4D Nucleofector System according to manufacturer's guidelines. Following nucleofection, the solution was quenched with appropriate culture media. The solution was then aliquoted in triplicate (approx. 67,000 cells per well) in a 96-well plate. 48 hours after transfection, treated cells were replenished with fresh mNPC media containing growth factors. 5 days after transfection, tdTomato mNPCs were lifted and activity was assessed by FACS.

### Aav Production:

[1235] Suspension HEK293T cells were adapted from parental HEK293T and grown in FreeStyle 293 media. For screening purposes, small scale cultures (20-30 mL cultured in 125 mL Erlenmeyer flasks and agitated at 110 rpm) were diluted to a density of 1.5e+6 cells/mL on the day of transfection. Endotoxin-free pAAV plasmids with the transgene flanked by ITR repeats were co-transfected with plasmids supplying the adenoviral helper genes for replication and AAV rep/cap genome using PEIMax (Polysciences) in serum-free OPTIMEM media. Cultures were supplemented with 10% CDM4HEK293 (HyClone) 3 hours post-transfection. Three days later, cultures were centrifuged at 1000 rpm for 10 minutes to separate the supernatant from the cell pellet. The supernatant was mixed with 40% PEG 2.5M NaCl (8% final concentration) and incubated on ice for at least 2 hours to precipitate AAV viral particles. The cell pellet, containing the majority of the AAV vectors, was resuspended in lysis media (0.15M NaCl, 50 mM Tris HCl, 0.05% Tween, pH 8.5), sonicated on ice (15 seconds, 30% amplitude) and treated with Benzonase (250 U/pL, Novagen) for 30 minutes at 37° C. Crude lysate and PEG-treated supernatant were then spin at 4000 rpm for 20 minutes at 4° C. to resuspend the PEG precipitated AAV (pellet) with cell debris-free crude lysate (supernatant). clarified further using 0.45 μm filter.

[1236] To determine the viral genome titer, 1 μL from crude lysate viruses was digested with DNase and ProtK, followed by quantitative PCR. 5 μL of digested virus was used in a 25 μL qPCR reaction composed of IDT primetime master mix and a set of primer and 6′FAM/Zen/IBFQ probe (IDT) designed to amplify the CMV promoter region (Fwd 5′-CATCTACGTATTAGTCATCGCTATTACCA-3′ (SEQ ID NO: 752); Rev 5′-GAAATCCCCGTGAGTCAAACC-3′(SEQ ID NO: 753), Probe 5′-TCAATGGGCGTGGATAG-3′(SEQ ID NO: 754)) or a 62 bp-fragment located in the AAV2-ITR (Fwd 5′-GGAACCCCTAGTGATGGAGTT-3′ (SEQ ID NO: 755); Rev 5′-CGGCCTCAGTGAGCGA-3′ (SEQ ID NO: 756), Probe 5′-CACTCCCTCTCTGCGCGCTCG-3′ (SEQ ID NO: 757)). Ten-fold serial dilutions (5p₁ each of 2e+9 to 2e+4 DNA copies/mL) of an AAV ITR plasmid was used as reference standards to calculate the titer (viral genome (vg)/mL) of viral samples. QPCR program was set up as: initial denaturation step at 95° C. for 5 minutes, followed by 40 cycles of denaturation at 95° C. for 1 min and annealing/extension at 60° C. for 1 min.

### AAV Transduction:

[1237] 10,000 cells/well of mNPCs were seeded on PLF-coated wells in 96-well plates 48-hours before AAV transduction. All viral infection conditions were performed in triplicate, with normalized number of vg among experimental vectors, in a series of 3-fold dilution of multiplicity of infection (MOI) ranging from ˜1.0e+6 to 1.0e+4 vg/cell. Calculations were based on an estimated number of 20,000 cells per well at the time of transfection. Final volume of 50 μL of AAV vectors diluted in pre-equilibrated mNPC medium supplemented with bFGF/EGF growth factors (20 ng/ml final concentration) were applied to each well. 48 hours post-transfection, complete media change was performed with fresh media supplemented with growth factors. Editing activity (tdt+cell quantification) was assessed by FACS 5 days post-transfection.

### Assessing Editing Activity by FACS:

[1238] 5 days after transfection, treated tdTomato mNPCs or ARPE-19 cells in 96-well plates were washed with dPBS and treated with 50 μL TrypLE and Trypsin (0.25%) for 15 and 5 minutes respectively. Following cell dissociation, treated wells were quenched with media containing DMEM, 10% FBS and 1X Penicillin/Streptomycin. Resuspended cells were transferred to round-bottom 96-well plates and centrifuged for 5 min at 1000 g. Cell pellets were then resuspended with dPBS containing 1X DAPI, and plates were loaded into an Attune NxT Flow Cytometer Autosampler. The Attune NxT flow cytometer was run using the following gating parameters: FSC-A x SSC-A to select cells, FSC-H x FSC-A to select single cells, FSC-A x VL1-A to select DAPI-negative alive cells, and FSC-A x YL1-A to select tdTomato positive cells.

NGS analysis of indels at mRHO exon 1 locus:

[1239] 5 days after transfection, treated tdTomato mNPCs in 96-well plates were washed with dPBS and treated with 50 μL TrypLE and Trypsin (0.25%) for 15 and 5 minutes respectively. Following cell dissociation, treated wells were quenched with media containing DMEM, 10% FBS and 1X penicillin/streptomycin. Cells were then spun down and resulting cell pellets washed with PBS prior to processing them for gDNA extraction using the Zymo mini DNA kit according to the manufacturer's instructions. For assessing editing levels occurring at the mouse RHO exon 1 locus, amplicons were amplified from 200 ng of gDNA with a set of primers (Fwd 5′-ACACTCTTTCCCTACACGACGCTCTTCCGATCTNNNNNNNGCAGCCTTGGTCTCTGT CTACG-3′ (SEQ ID NO: 758); Rev 5′-GTGACTGGAGTTCAGACGTGTGCTCTTCCGATCTGCCCCAGTCTCTCTGCTCATACC-3′ (SEQ ID NO: 759)), bead-purified (Beckman coulter, Agencourt Ampure XP) and then re-amplified to incorporate an Illumina adapter sequence and a 16 nt unique molecular identifier (UMI). Quality and quantification of the amplicon was assessed using a Fragment Analyzer DNA analyzer kit (Agilent, dsDNA 35-1500 bp). Amplicons were sequenced on the Illumina Miseq™ according to the manufacturer's instructions. Raw fastq files from sequencing were processed as follows: (1) the sequences were trimmed for quality and for adapter sequences using the program cutadapt (v. 2.1); (2) the sequences from read 1 and read 2 were merged into a single insert sequence using the program flash2 (v2.2.00); and (3) the consensus insert sequences were run through the program CRISPResso2 (v 2.0.29), along with the expected amplicon sequence and the spacer sequence. This program quantifies the percent of reads that were modified in a window around the 3′ end of the spacer (30 bp window centered at −3 bp from 3′ end of spacer). CasX activity was quantified as the total percent of reads that contain insertions, substitutions and/or deletions anywhere within this window.

### Results:

[1240] Different editing experiments were conducted to quantify on-target cleavage mediated by CasX 491 paired with novel gRNA scaffold variants (guides 174 & 229-237) with different spacers targeting multiple genomic loci of interest. Constructs were cloned into the AAV backbone p59, flanked by ITR2 sequences, driving expression of the protein Cas 491 under the control of a CMV promoter, as well the scaffold-spacer under the control of the human U6 promoter. The mNPC-tdT reporter cell lines was used to assess the dual-cut efficiency mediated by a single spacer at the tdTomato locus (spacer 12.7, TTC PAM), as well as the single cut efficiency at the endogenous mouse RHO exon 1 locus (spacer 11.30, CTCN PAM). A dual reporter system integrated in an ARPE-19 derived cell line was also used to assess on-target editing at the exogenously expressed human WT Rho locus (spacers 11.1, CTC PAM). [01097] gRNA scaffold variants with spacers 12.7 and 11.30 were tested via nucleofection in the mouse NPC cell line at two different doses indicated in FIG. 14 and FIG. 15 respectively. Constructs were compared to the current benchmark gRNA scaffold 174 activity. At both targeted loci, constructs of guide scaffold variants 231, 233, 234, and 235 performed at higher levels than the construct containing scaffold 174. Scaffold 235 displayed a 2-fold increase in activity at mRHO exon 1 locus compared to scaffold 174. We further validated that scaffold 235 consistently improved activity without increased off-target cleavage by nucleofecting dual reporter ARPE-19 cell line with construct p59.491.174.11.1 and p59.491.235.11.1 as well as a non-target spacer control. Spacer 11.1 was targeting the exogenously expressed mRHO-GFP gene. Scaffold 235 displayed 3-fold increased activity compared to 174 (9% vs 3% of Rho-GFP-cells, respectively). Allele-specificity was assessed by looking at percent of P23H—RHO-Scarlett-cell population, which sequence differs from WT by 1 bp.

[1241] Finally, we sought to demonstrate that these scaffold variants packaged efficiently in AAV and remained potent when delivered virally. mNPC transduced with AAV vectors expressing guide scaffold variants 174 and 235 with spacer 11.30 (on target, mouse WT RHO) and 11.31 (off-target, mouse P23 RHO) showed increased activity of constructs containing the 235 scaffold variant compared to scaffold 174 at on-target locus (>5-fold increase, FIGS. 45A and B) at 3.0e+5 MOI while no off-target indels were detectable.

[1242] The results support that scaffold variants with novel structural mutations can be engineered with increased activity in dual reporter systems with therapeutically-relevant genomic targets such as mouse and human RHO exon 1 loci. Furthermore, while the newly-characterized scaffold displayed an overall >2-fold increase in activity, no off-target cleavage with 1-bp mismatch spacer region was detected. This is relevant for allele-specific therapeutic strategy such as adRP P23H Rho, which mutated allele differs from WT sequence by 1 nucleotide, targeted by spacer 11.31. This study further validates the use of guide scaffold 235 in AAV vectors designed for P23H RHO rescue and genotoxic studies, as well as for other therapeutic targets.

### Example 22: Demonstration that Catalytically-Dead CasX does not Edit at the Endogenous B2M Locus In Vitro

[1243] Experiments will be performed to demonstrate that catalytically-dead CasX is unable to edit the endogenous gene beta-2-microglobulin (B2M) in vitro.

### Materials and Methods:

Generation of Catalytically-Dead CasX (dCasX) Constructs and Cloning:

[1244] CasX variant 491, 527, 668 and 676 with scaffold varianm 174 will be used in these experiments. A positive control of Cas9 and an appropriate guide will also be included. To generate catalytically-dead CasX 491 (dCasX491; CAS096; SEQ ID NO: 1107) and catalytically-dead CasX 527 (dCasX527; CAS142; SEQ ID NO: 1109), D659, E756, D921 catalytic residues of the RuvC domain of CasX variant 491, and D660, E757, and D922 catalytic residues of the RuvC domain of CasX variant 527 will be mutated to alanine to abolish the endonuclease activity. Similarly, D660, E757, D923-to-alanine mutations at catalytic residues within the RuvC domain of CasX variants 668 and 676 will be designed to generate catalytically-dead CasX 668 (dCasX668; CAS401; SEQ ID NO: XX) and catalytically-dead CasX 676 (dCasX676; CAS402; SEQ ID NO: XX). The resulting plasmids (dCasX variant amino acid sequences listed in Table 7) will contain constructs with the following configuration: Eflu-SV40NLS-dCasX variant-SV40NLS. Plasmids will also contain sequences encoding a gRNA scaffold variant 174 having either a spacer (spacer. 7.37; GGCCGAGAUGUCUCGCUCCG, SEQ ID NO: 1105) targeting the endogenous B2M locus or a non-targeting control (spacer 0.0; CGAGACGUAAUUACGUCUCG; SEQ ID NO: 1106).

[1245] Constructs containing sequences coding for dCasX491, dCasX527, dCasX668, and dCasX676 will be ordered as oligonucleotides and assembled by overlap extension PCR followed by isothermal assembly to build plasmids encoding for the catalytically-dead CasX variants. Following isothermal assembly, resulting plasmids will be transformed into chemically competent E. coli cells, which will be plated on kanamycin LB-agar plates following recovery at 37° C. for 1 hour. Single colonies will be picked for colony PCR and Sanger-sequencing. Sequence-validated constructs will be midi-prepped for subsequent transfection into HEK293T cells.

Plasmid Transfection into HEK293T Cells:

[1246] HEK293T cells will be seeded at a density of 30,000 cells in each well of a 96-well plate. The next day, each well will be transiently transfected using Lipofectamine™ with 100 ng of catalytically-dead variant plasmid containing a CasX:gRNA construct encoding for CasX variant 491, dCasX491, dCasX527, dCasX668, or dCasX676 (sequences in Table 7), with the gRNA having either non-targeting spacer 0.0 or targeting spacer 7.37 to the B2M locus. Each construct will be tested in triplicate. 24 hours post-transfection, cells will be selected with 2pg/mL puromycin. Six days after transfection, cells will be harvested for editing analysis by next-generation sequencing (NGS) and B2M protein expression analysis via B2M immunostaining followed by flow cytometry. Expression of B2M will be determined by using an antibody (BioLegend) that will detect the B2M-dependent HLA protein expressed on the cell surface. HLA+cells will be measured using the Attune NxT flow cytometer.

### NGS Processing and Analysis:

[1247] Genomic DNA (gDNA) from harvested cells will be extracted using the Zymo Quick-DNA Miniprep Plus kit following the manufacturer's instructions. Target amplicons will be formed by amplifying regions of interest from 200 ng of extracted gDNA with a set of primers specific to the human B2M locus. These gene-specific primers contain an additional sequence at the 5′ end to introduce an Illumina adapter and a 16-nucleotide unique molecule identifier. Amplified DNA products will be purified with the Ampure XP DNA cleanup kit. Quality and quantification of the amplicon will be assessed using a Fragment Analyzer DNA Analysis kit (Agilent, dsDNA 35-1500 bp). Amplicons will be sequenced on the Illumina Miseq™ according to the manufacturer's instructions. Raw fastq files from sequencing will be quality-controlled and processed using cutadapt v2.1, flash2 v2.2.00, and CRISPResso2 v2.0.29. Each sequence will be quantified for containing an insertion or deletion (indel) relative to the reference sequence, in a window around the 3′ end of the spacer (30 bp window centered at −3 bp from 3′ end of spacer). CasX activity will be quantified as the total percent of reads that contain insertions, substitutions, and/or deletions anywhere within this window for each sample.

### Results:

[1248] The experiments are expected to demonstrate editing at the B2M locus mediated by catalytically-active CasX 491, which will result in reduced B2M protein expression. On the other hand, neither dCasX491, dCasX527, dCasX668, nor dCasX676 are expected to show editing at the B2M locus. Given the anticipated steric hindrance of the catalytically-dead CasX molecule at the transcription start site of the B2M locus, a slight repression in B2M protein expression is expected with either enzymatically-inactive CasX molecule.

### Example 23: Improving MS2 Hairpin Binding Affinity Enhances XDP Editing Potency

[1249] Experiments were conducted to determine whether editing potency of XDPs could be improved using a recruitment strategy whereby the gRNA of the CasX:gRNA RNP complex contains a functionalized RNA extended stem with an MS2 hairpin having high affinity for a Gag-MS2 RNA-binding protein (RBP). Binding of the RNA hairpin to the MS2 RBP enables recruitment of the CasX RNP cargo to the XDP particle. Upon delivery of the XDP to the target cell for editing, this RNA hairpin-MS2 RBP is expected to dissociate, allowing CasX to translocate to the nucleus. Thus, increasing the stability of the MS2 protein-RNA complex supports XDP formation, which may be achieved by changing the MS2 RNA-binding protein or RNA hairpin sequences to increase the binding affinity between these components.

[1250] To explore this principle further, gRNAs incorporating RNA hairpin variants with varying affinities for the MS2 RBP were evaluated using a high-throughput, in vitro biochemical assay to assess equilibrium binding and dissociation kinetics (Buenrostro et al., Quantitative analysis of RNA-protein interactions on a massively parallel array reveals biophysical and evolutionary landscapes. Nat Biotechnol. 32(6):562 (2014)). gRNA hairpin variants and their associated K_{D} (dissociation constant) values are listed in Table 34; sequences of the guide plasmids encoding the different MS2 RNA hairpin variants are provided in Table 35 and the sequences of the MS2 hairpins are provided in Table 36. Experiments were conducted to investigate whether gRNAs containing MS2 hairpin variants with improved binding affinity would enhance XDP formation or editing potency. Specifically, multiple MS2 hairpin variants with varying equilibrium binding affinities were assessed for their effects on XDP potency and titer. Several non-binding variants were also included in these experiments. Table 34. gRNA scaffolds containing MS2 hairpin variants with varying affinities and their dissociation constant values (K_{D}). Specific positions for the indicated nucleotide mutations refer to the positions of the base MS2 hairpin (scaffold 188) depicted in FIG. 48

| | | | | |
|---|---|---|---|---|
| | Positions of indicated | | | |
| Scaffold | nucleotide changes within | | | |
| No. | MS2 hairpin (scaffold 188) | K_{D} (nM) | K_{OFF} (1/s) | −Δlog(K_{OFF})/−ΔΔG |

High affinity MS2 hairpin variants

| | | | | |
|---|---|---|---|---|
| 188 | | 2.558 | 0.001 | |
| 251 | | 2.558 | | |
| 296 | −13C, 1G | 1.881 | 0.001 | 0.510 |
| 297 | −15G, 3C | 2.112 | 0.001 | 0.062 |
| 298 | −15G, −13C, 1G, 3C | | | |
| 299 | −15G, −13C, −8C, −3G, 1G, 3C | | | |
| 300 | −8C, −3G | 2.686 | 0.002 | >1 |

Medium-high affinity MS2 hairpin variants

| | | | | |
|---|---|---|---|---|
| 304 | −13U | 9.346 | 0.002 | 0.286 |
| 307 | −11U, −1A | 9.226 | 0.003 | 0.579 |
| 313 | −6C | 9.274 | 0.002 | 0.400 |

Medium affinity MS2 hairpin variants

| | | | | |
|---|---|---|---|---|
| 301 | −8U, −3A | 34.084 | 0.007 | 0.654 |
| 303 | −15C, −13U | | 0.002 | 0.089 |
| 305 | −13C | 17.634 | 0.002 | 0.163 |
| 306 | −1U | | 0.015 | 0.854 |
| 310 | −5U | 36.912 | 0.016 | 0.910 |
| 314 | −14G, 3G | | 0.002 | 0.120 |

Medium-low affinity MS2 hairpin variants

| | | | | |
|---|---|---|---|---|
| 308 | −11U, −1G | 77.562 | 0.018 | 0.754 |

Low affinity MS2 hairpin variants

| | | | | |
|---|---|---|---|---|
| 309 | −11U, −1U | 453.563 | N/A | N/A |
| 311 | −5A | 415.477 | N/A | N/A |
| 302 | −8A, −3G | 1489.244 | N/A | N/A |

No affinity MS2 hairpin variants

| | | | | |
|---|---|---|---|---|
| 312 | −5G | 12506.440 | N/A | N/A |
| 315 | −10G | 18018.92728 | N/A | N/A |

TABLE 35
Sequences of XDP plasmids

| Plasmid | | |
|---|---|---|
| ID | Description | DNA Sequence or SEQ ID NO |
| pXDP161 | Gag-(-1)-PR | 1111 |
| pXDP164 | Gag-MS2 | 1112 |
| pXDP353 | Gag- | 1113 |
| | MS2(N55K) | |
| pXDP344 | CasX 491 | 1114 |
| | NLS 240 | |
| pSG50 | Scaffold 188 | ACTGGCGCTTTTATCTGATTACTTTGAGAGCCATCACCAGCGACTATGTCGT |
| | | AGTGGGTAAAGCTCACATGAGGATCACCCATGTGAGCATCAAAGCTGCATTC |
| | | TAGTTGTGGTTT (SEQ ID NO: 1115) |
| pSG73 | Scaffold 251 | ACTGGCGCTTTTATCTGATTACTTTGAGAGCCATCACCAGCGACTATGTCGT |
| | | AGTGGGTAAAGCTGCACTATGGGCGCAGCTCATGAGGATCACCCATGAGCTG |
| | | ACGGTACAGGCCACATGAGGATCACCCATGTGGTATAGTGCAGCATCAAAGC |
| | | TGCATTCTAGTTGTGGTTT (SEQ ID NO: 1116) |
| pSG170 | Scaffold 296 | ACTGGCGCTTTTATCTGATTACTTTGAGAGCCATCACCAGCGACTATGTCGT |
| | | AGTGGGTAAAGCTCACCTGAGGATCACCCAGGTGAGCATCAAAGCTGCATTC |
| | | TAGTTGTGGTTTTTTTTT (SEQ ID NO: 1117) |
| pSG171 | Scaffold 297 | ACTGGCGCTTTTATCTGATTACTTTGAGAGCCATCACCAGCGACTATGTCGT |
| | | AGTGGGTAAAGCTCGCATGAGGATCACCCATGCGAGCATCAAAGCTGCATTC |
| | | TAGTTGTGGTTTTTTTTT (SEQ ID NO: 1118) |
| pSG172 | Scaffold 298 | ACTGGCGCTTTTATCTGATTACTTTGAGAGCCATCACCAGCGACTATGTCGT |
| | | AGTGGGTAAAGCTCGCCTGAGGATCACCCAGGCGAGCATCAAAGCTGCATTC |
| | | TAGTTGTGGTTTTTTTTT (SEQ ID NO: 1119) |
| pSG173 | Scaffold 299 | ACTGGCGCTTTTATCTGATTACTTTGAGAGCCATCACCAGCGACTATGTCGT |
| | | AGTGGGTAAAGCTCGCCTGAGCATCAGCCAGGCGAGCATCAAAGCTGCATTC |
| | | TAGTTGTGGTTTTTTTTT (SEQ ID NO: 1120) |
| pSG174 | Scaffold 300 | ACTGGCGCTTTTATCTGATTACTTTGAGAGCCATCACCAGCGACTATGTCGT |
| | | AGTGGGTAAAGCTCACATGAGCATCAGCCATGTGAGCATCAAAGCTGCATTC |
| | | TAGTTGTGGTTTTTTTTT (SEQ ID NO: 1121) |
| pSG175 | Scaffold 301 | ACTGGCGCTTTTATCTGATTACTTTGAGAGCCATCACCAGCGACTATGTCGT |
| | | AGTGGGTAAAGCTCACATGAGTATCAACCATGTGAGCATCAAAGCTGCATTC |
| | | TAGTTGTGGTTTTTTTTT (SEQ ID NO: 1122) |
| pSG176 | Scaffold 302 | ACTGGCGCTTTTATCTGATTACTTTGAGAGCCATCACCAGCGACTATGTCGT |
| | | AGTGGGTAAAGCTCACATGAGAATCAGCCATGTGAGCATCAAAGCTGCATTC |
| | | TAGTTGTGGTTTTTTTTT (SEQ ID NO: 1123) |
| pSG177 | Scaffold 303 | ACTGGCGCTTTTATCTGATTACTTTGAGAGCCATCACCAGCGACTATGTCGT |
| | | AGTGGGTAAAGCTCCCTTGAGGATCACCCATGTGAGCATCAAAGCTGCATTC |
| | | TAGTTGTGGTTTTTTTTT (SEQ ID NO: 1124) |
| pSG178 | Scaffold 304 | ACTGGCGCTTTTATCTGATTACTTTGAGAGCCATCACCAGCGACTATGTCGT |
| | | AGTGGGTAAAGCTCACTTGAGGATCACCCATGTGAGCATCAAAGCTGCATTC |
| | | TAGTTGTGGTTTTTTTTT (SEQ ID NO: 1125) |
| pSG179 | Scaffold 305 | ACTGGCGCTTTTATCTGATTACTTTGAGAGCCATCACCAGCGACTATGTCGT |
| | | AGTGGGTAAAGCTCACCTGAGGATCACCCATGTGAGCATCAAAGCTGCATTC |
| | | TAGTTGTGGTTTTTTTTT (SEQ ID NO: 1126) |
| pSG180 | Scaffold 306 | ACTGGCGCTTTTATCTGATTACTTTGAGAGCCATCACCAGCGACTATGTCGT |
| | | AGTGGGTAAAGCTCACATGAGGATCACCTATGTGAGCATCAAAGCTGCATTC |
| | | TAGTTGTGGTTTTTTTTT (SEQ ID NO: 1127) |
| pSG181 | Scaffold 307 | ACTGGCGCTTTTATCTGATTACTTTGAGAGCCATCACCAGCGACTATGTCGT |
| | | AGTGGGTAAAGCTCACATTAGGATCACCAATGTGAGCATCAAAGCTGCATTC |
| | | TAGTTGTGGTTTTTTTTT (SEQ ID NO: 1128) |
| pSG182 | Scaffold 308 | ACTGGCGCTTTTATCTGATTACTTTGAGAGCCATCACCAGCGACTATGTCGT |
| | | AGTGGGTAAAGCTCACATTAGGATCACCGATGTGAGCATCAAAGCTGCATTC |
| | | TAGTTGTGGTTTTTTTTT (SEQ ID NO: 1129) |
| pSG183 | Scaffold 309 | ACTGGCGCTTTTATCTGATTACTTTGAGAGCCATCACCAGCGACTATGTCGT |
| | | AGTGGGTAAAGCTCACATTAGGATCACCTATGTGAGCATCAAAGCTGCATTC |
| | | TAGTTGTGGTTTTTTTTT (SEQ ID NO: 1130) |
| pSG184 | Scaffold 310 | ACTGGCGCTTTTATCTGATTACTTTGAGAGCCATCACCAGCGACTATGTCGT |
| | | AGTGGGTAAAGCTCACATGAGGATTACCCATGTGAGCATCAAAGCTGCATTC |
| | | TAGTTGTGGTTTTTTTTT (SEQ ID NO: 1131) |
| pSG185 | Scaffold 311 | ACTGGCGCTTTTATCTGATTACTTTGAGAGCCATCACCAGCGACTATGTCGT |
| | | AGTGGGTAAAGCTCACATGAGGATAACCCATGTGAGCATCAAAGCTGCATTC |
| | | TAGTTGTGGTTTTTTTTT (SEQ ID NO: 1132) |
| pSG186 | Scaffold 312 | ACTGGCGCTTTTATCTGATTACTTTGAGAGCCATCACCAGCGACTATGTCGT |
| | | AGTGGGTAAAGCTCACATGAGGATGACCCATGTGAGCATCAAAGCTGCATTC |
| | | TAGTTGTGGTTTTTTTTT (SEQ ID NO: 1133) |
| pSG187 | Scaffold 313 | ACTGGCGCTTTTATCTGATTACTTTGAGAGCCATCACCAGCGACTATGTCGT |
| | | AGTGGGTAAAGCTCACATGAGGACCACCCATGTGAGCATCAAAGCTGCATTC |
| | | TAGTTGTGGTTTTTTTTT (SEQ ID NO: 1134) |
| pSG188 | Scaffold 314 | ACTGGCGCTTTTATCTGATTACTTTGAGAGCCATCACCAGCGACTATGTCGT |
| | | AGTGGGTAAAGCTCAGATGAGGATCACCCATGGGAGCATCAAAGCTGCATTC |
| | | TAGTTGTGGTTTTTTTTT (SEQ ID NO: 1135) |
| pSG189 | Scaffold 315 | ACTGGCGCTTTTATCTGATTACTTTGAGAGCCATCACCAGCGACTATGTCGT |
| | | AGTGGGTAAAGCTCACATGGGGATCACCCATGTGAGCATCAAAGCTGCATTC |
| | | TAGTTGTGGTTTTTTTTT (SEQ ID NO: 1136) |

TABLE 36
MS2 hairpin variant sequences

| Scaffold | | |
|---|---|---|
| No. | MS2 Sequences | SEQ ID NO |
| 188 | ACAUGAGGAUCACCCAUGU | 1137 |
| 251 | | |
| 296 | ACCUGAGGAUCACCCAGGU | 1138 |
| 297 | GCAUGAGGAUCACCCAUGC | 1139 |
| 298 | GCCUGAGGAUCACCCAGGC | 1140 |
| 299 | GCCUGAGCAUCAGCCAGGC | 1141 |
| 300 | ACAUGAGCAUCAGCCAUGU | 1142 |
| 304 | ACUUGAGGAUCACCCAUGU | 1143 |
| 307 | ACAUUAGGAUCACCAAUGU | 1144 |
| 313 | ACAUGAGGACCACCCAUGU | 1145 |

### Materials and Methods:

[1251] All plasmids encoding CasX proteins pertain to CasX variant 491. All XDPs were pseudotyped with 10% VSV-G (percentage of VSV-G plasmid relative to other XDP structural plasmids). RNA fold structures were generated with RNAfold web server and VARNA software. The methods to produce XDPs are described herein, as well as in WO2021113772A1, incorporated by reference in its entirety.

### Structural Plasmid Cloning:

[1252] Briefly, to generate the XDP structural plasmids, the Gag-pol sequence was removed from pXDP1 (UC Berkeley), and amplified and purified fragments encoding CasX 491, HIV-1, or MS2 CP components were cloned into plasmid backbones using the In-Fusion HD Cloning Kit (Takara) following the manufacturer's protocols. Assembled products were transformed into chemically-competent Turbo Competent E. coli cells, plated on LB-Agar plates containing ampicillin following recovery at 37° C. Individual colonies were picked, miniprepped, and Sanger-sequenced for assembly verification. Plasmid sequences are listed in Table 35.

### Guide Plasmid Cloning:

[1253] All guide plasmids containing MS2 RNA hairpin variants incorporated the tdTomato targeting spacer 12.7 (CUGCAUUCUAGUUGUGGUUU; SEQ ID NO: 1146). The tdTomato targeting spacer was cloned as previously described. Briefly, the spacer was made by annealing two oligos and cloned via Golden Gate assembly with the appropriate restriction enzymes into a pSG plasmid with an alternate scaffold. Cloned spacers were subjected to transformation, mini-prepping, and Sanger-sequencing for verification. pGP2 glycoprotein plasmid cloning:

[1254] Briefly, sequences encoding the VSV-G glycoprotein and CMV promoter and the backbone taken from a kanamycin-resistant plasmid were amplified and purified as previously described. These constructs were cloned into plasmid backbones using the In-Fusion® HD Cloning Kit (Takara) following the manufacturer protocols. Assembled products were transformed into chemically-competent Turbo Competent E. coli cells, plated on LB-Agar plates containing kanamycin and incubated at 37° C. Individual colonies were picked, miniprepped, and Sanger-sequenced for assembly verification.

### Xdp Production:

[1255] Briefly, HEK293T Lenti-X cells were seeded in 15 cm dishes at 20×10⁶ cells per dish 24 hours before transfection to reach 70-90% confluency. The next day, Lenti-X cells were transfected with the following plasmids using PEI Max (Polypus): XDP structural plasmids (also encoding the CasX variants), guide plasmid variants, and pGP2 for XDP pseudotyping. 24 hours post-transfection, media was replaced with Opti-MEM (Thermo Fisher). XDP-containing media was collected 72 hours post-transfection and filtered through a 0.45 μm PES filter. The supernatant was concentrated and purified via centrifugation. XDPs were resuspended in 500 μL of DMEM/F12 supplemented with Glutamax, HEPES, NEAA, Pen/Strep, 2-mercaptoethanol, B-27 without vitamin A, and N2.

XDP Transduction of tdTomato Neural Progenitor Cells (NPCs):

[1256] tdTomato NPCs were grown in DMEM/F12 supplemented with Glutamax, HEPES, NEAA, Pen/Strep, 2-mercaptoethanol, B-27 without vitamin A, and N2. Cells were harvested using StemPro Accutase Cell Dissociation Reagent and seeded on PLF-coated 96-well plates. 48 hours later, cells were transduced with XDPs containing tdTomato targeting spacer, starting with a neat resuspended virus and proceeding through 5 half-log dilutions. Cells were then centrifuged for 15 minutes at 1000× g. Transduced NPCs were grown for 96 hours before analyzing tdTomato fluorescence by flow cytometry as a marker of editing at the tdTomato locus, with the EC50 determined as the number of XDP particles needed to achieve editing in 50% of the cells, as determined by flow cytometry. Assays were run 2-3 times for each sample with similar results.

### Results:

[1257] XDPs composed of Gag-MS2, Gag-pro, CasX, gRNA scaffold variants, and VSV-G were produced either with the original MS2 (MS2 WT) or an MS2 high affinity variant (MS2 353). Produced XDPs were subsequently assessed for their editing efficiency at the tdTomato locus in NPCs. FIG. 49 shows the percent editing at the tdTomato locus as measured by tdTomato fluorescence using flow cytometry when 0.007 μL of concentrated XDP preps were used to transduce NPCs. In addition to the base control gRNA scaffolds 188 and 251, high affinity scaffold variants 296 and 298 demonstrated enhanced potency with both MS2 WT and MS2 353, with K_{D} values ranging from 1.8 to 2.1 nM. Furthermore, medium affinity scaffold variants 303, 304, 305, 307, 310 and 313, with K_{D} values ranging from 9.2 to 36.9 nM, resulted in promising editing efficiencies. FIG. 50 illustrates EC50 results across the different gRNA scaffolds incorporating the MS2 WT and MS 353 configurations. Scaffold variants 296, 297, and 305 exhibited a slightly higher potency compared to scaffold 188, an advantage that was more evident with the MS2 353 configuration. FIG. 51 shows a clear correlation between the affinity (K_{D}) of the gRNA MS2 hairpin and resulting XDP potency (EC50), with an R² value of 0.81 (p<0.001). XDP comprising MS2 having an affinity of <35 nM resulted in efficient recruitment and packaging of the CasX RNP into XDPs. However, under the conditions of these experiments, there was no correlation observed between the affinity (K_{D}) of the gRNA MS2 hairpin and resulting XDP titer (FIG. 52).

The application's sequence listing, which the Patent Office published only in electronic form, follows.

SEQUENCE LISTING (2398 sequences)

SEQ ID NO: 1 - protein, 986 aa, unidentified
  REGION 1..986: note = Deltaproteobacteria sp.
MEKRINKIRKKLSADNATKPVSRSGPMKTLLVRVMTDDLKKRLEKRRKKPEVMPQVISNNAANNLRMLLDDYTKMKEAILQVYWQEFKDDHVGLMCKFAQPASKKIDQNKLKPEMDEKGNLTTAGFACSQCGQPLFVYKLEQVSEKGKAYTNYFGRCNVAEHEKLILLAQLKPEKDSDEAVTYSLGKFGQRALDFYSIHVTKESTHPVKPLAQIAGNRYASGPVGKALSDACMGTIASFLSKYQDIIIEHQKVVKGNQKRLESLRELAGKENLEYPSVTLPPQPHTKEGVDAYNEVIARVRMWVNLNLWQKLKLSRDDAKPLLRLKGFPSFPVVERRENEVDWWNTINEVKKLIDAKRDMGRVFWSGVTAEKRNTILEGYNYLPNENDHKKREGSLENPKKPAKRQFGDLLLYLEKKYAGDWGKVFDEAWERIDKKIAGLTSHIEREEARNAEDAQSKAVLTDWLRAKASFVLERLKEMDEKEFYACEIQLQKWYGDLRGNPFAVEAENRVVDISGFSIGSDGHSIQYRNLLAWKYLENGKREFYLLMNYGKKGRIRFTDGTDIKKSGKWQGLLYGGGKAKVIDLTFDPDDEQLIILPLAFGTRQGREFIWNDLLSLETGLIKLANGRVIEKTIYNKKIGRDEPALFVALTFERREVVDPSNIKPVNLIGVDRGENIPAVIALTDPEGCPLPEFKDSSGGPTDILRIGEGYKEKQRAIQAAKEVEQRRAGGYSRKFASKSRNLADDMVRNSARDLFYHAVTHDAVLVFENLSRGFGRQGKRTFMTERQYTKMEDWLTAKLAYEGLTSKTYLSKTLAQYTSKTCSNCGFTITTADYDGMLVRLKKTSDGWATTLNNKELKAEGQITYYNRYKRQTVEKELSAELDRLSEESGNNDISKWTKGRRDEALFLLKKRFSHRPVQEQFVCLDCGHEVHADEQAALNIARSWLFLNSNSTEFKSYKSGKQPFVGAWQAFYKRRLKEVWKPNA

SEQ ID NO: 2 - protein, 978 aa, unidentified
  REGION 1..978: note = Planctomycetes sp.
MQEIKRINKIRRRLVKDSNTKKAGKTGPMKTLLVRVMTPDLRERLENLRKKPENIPQPISNTSRANLNKLLTDYTEMKKAILHVYWEEFQKDPVGLMSRVAQPAPKNIDQRKLIPVKDGNERLTSSGFACSQCCQPLYVYKLEQVNDKGKPHTNYFGRCNVSEHERLILLSPHKPEANDELVTYSLGKFGQRALDFYSIHVTRESNHPVKPLEQIGGNSCASGPVGKALSDACMGAVASFLTKYQDIILEHQKVIKKNEKRLANLKDIASANGLAFPKITLPPQPHTKEGIEAYNNVVAQIVIWVNLNLWQKLKIGRDEAKPLQRLKGFPSFPLVERQANEVDWWDMVCNVKKLINEKKEDGKVFWQNLAGYKRQEALLPYLSSEEDRKKGKKFARYQFGDLLLHLEKKHGEDWGKVYDEAWERIDKKVEGLSKHIKLEEERRSEDAQSKAALTDWLRAKASFVIEGLKEADKDEFCRCELKLQKWYGDLRGKPFAIEAENSILDISGFSKQYNCAFIWQKDGVKKLNLYLIINYFKGGKLRFKKIKPEAFEANRFYTVINKKSGEIVPMEVNFNFDDPNLIILPLAFGKRQGREFIWNDLLSLETGSLKLANGRVIEKTLYNRRTRQDEPALFVALTFERREVLDSSNIKPMNLIGIDRGENIPAVIALTDPEGCPLSRFKDSLGNPTHILRIGESYKEKQRTIQAAKEVEQRRAGGYSRKYASKAKNLADDMVRNTARDLLYYAVTQDAMLIFENLSRGFGRQGKRTFMAERQYTRMEDWLTAKLAYEGLPSKTYLSKTLAQYTSKTCSNCGFTITSADYDRVLEKLKKTATGWMTTINGKELKVEGQITYYNRYKRQNVVKDLSVELDRLSEESVNNDISSWTKGRSGEALSLLKKRFSHRPVQEKFVCLNCGFETHADEQAALNIARSWLFLRSQEYKKYQTNKTTGNTDKRAFVETWQSFYRKKLKEVWKPAV

SEQ ID NO: 3 - protein, 855 aa, unidentified
  REGION 1..855: note = Candidatus Sungbacteria sp.
MDNANKPSTKSLVNTTRISDHFGVTPGQVTRVFSFGIIPTKRQYAIIERWFAAVEAARERLYGMLYAHFQENPPAYLKEKFSYETFFKGRPVLNGLRDIDPTIMTSAVFTALRHKAEGAMAAFHTNHRRLFEEARKKMREYAECLKANEALLRGAADIDWDKIVNALRTRLNTCLAPEYDAVIADFGALCAFRALIAETNALKGAYNHALNQMLPALVKVDEPEEAEESPRLRFFNGRINDLPKFPVAERETPPDTETIIRQLEDMARVIPDTAEILGYIHRIRHKAARRKPGSAVPLPQRVALYCAIRMERNPEEDPSTVAGHFLGEIDRVCEKRRQGLVRTPFDSQIRARYMDIISFRATLAHPDRWTEIQFLRSNAASRRVRAETISAPFEGFSWTSNRTNPAPQYGMALAKDANAPADAPELCICLSPSSAAFSVREKGGDLIYMRPTGGRRGKDNPGKEITWVPGSFDEYPASGVALKLRLYFGRSQARRMLTNKTWGLLSDNPRVFAANAELVGKKRNPQDRWKLFFHMVISGPPPVEYLDFSSDVRSRARTVIGINRGEVNPLAYAVVSVEDGQVLEEGLLGKKEYIDQLIETRRRISEYQSREQTPPRDLRQRVRHLQDTVLGSARAKIHSLIAFWKGILAIERLDDQFHGREQKIIPKKTYLANKTGFMNALSFSGAVRVDKKGNPWGGMIEIYPGGISRTCTQCGTVWLARRPKNPGHRDAMVVIPDIVDDAAATGFDNVDCDAGTVDYGELFTLSREWVRLTPRYSRVMRGTLGDLERAIRQGDDRKSRQMLELALEPQPQWGQFFCHRCGFNGQSDVLAATNLARRAISLIRRLPDTDTPPTP

SEQ ID NO: 4 - RNA, 108 nt, synthetic construct
  misc_feature 1..108: note = reference sgRNA
  source 1..108: mol_type = other RNA
acatctggcgcgtttattccattactttggagccagtcccagcgactatgtcgtatggacgaagcgcttatttatcggagagaaaccgataagtaaaacgcatcaaag

SEQ ID NO: 5 - RNA, 108 nt, synthetic construct
  misc_feature 1..108: note = reference sgRNA
  source 1..108: mol_type = other RNA
tactggcgcttttatctcattactttgagagccatcaccagcgactatgtcgtatgggtaaagcgcttatttatcggagagaaatccgataaataagaagcatcaaag

SEQ ID NO: 6 - RNA, 81 nt, synthetic construct
  misc_feature 1..81: note = tracrRNA sequence
  source 1..81: mol_type = other RNA
acatctggcgcgtttattccattactttggagccagtcccagcgactatgtcgtatggacgaagcgcttatttatcggaga

SEQ ID NO: 7 - RNA, 78 nt, synthetic construct
  misc_feature 1..78: note = tracrRNA sequence
  source 1..78: mol_type = other RNA
acatctggcgcgtttattccattactttggagccagtcccagcgactatgtcgtatggacgaagcgcttatttatcgg

SEQ ID NO: 8 - RNA, 80 nt, synthetic construct
  misc_feature 1..80: note = tracrRNA sequence
  source 1..80: mol_type = other RNA
tactggcgcttttatctcattactttgagagccatcaccagcgactatgtcgtatgggtaaagcgcttatttatcggaga

SEQ ID NO: 9 - RNA, 77 nt, synthetic construct
  misc_feature 1..77: note = tracrRNA sequence
  source 1..77: mol_type = other RNA
tactggcgcttttatctcattactttgagagccatcaccagcgactatgtcgtatgggtaaagcgcttatttatcgg

SEQ ID NO: 10 - RNA, 25 nt, synthetic construct
  misc_feature 1..25: note = tracrRNA sequence
  source 1..25: mol_type = other RNA
gtttacacactccctctcatagggt

SEQ ID NO: 11 - RNA, 25 nt, synthetic construct
  misc_feature 1..25: note = tracrRNA sequence
  source 1..25: mol_type = other RNA
gtttacacactccctctcatgaggt

SEQ ID NO: 12 - RNA, 25 nt, synthetic construct
  misc_feature 1..25: note = tracrRNA sequence
  source 1..25: mol_type = other RNA
ttttacataccccctctcatgggat

SEQ ID NO: 13 - RNA, 25 nt, synthetic construct
  misc_feature 1..25: note = tracrRNA sequence
  source 1..25: mol_type = other RNA
gtttacacactccctctcatggggg

SEQ ID NO: 14 - RNA, 20 nt, synthetic construct
  misc_feature 1..20: note = reference sgRNA
  source 1..20: mol_type = other RNA
ccagcgactatgtcgtatgg

SEQ ID NO: 15 - RNA, 39 nt, synthetic construct
  misc_feature 1..39: note = extended stem loop
  source 1..39: mol_type = other RNA
gcgcttatttatcggagagaaatccgataaataagaagc

SEQ ID NO: 16 - RNA, 74 nt, synthetic construct
  misc_feature 1..74: note = reference sgRNA
  source 1..74: mol_type = other RNA
ggcgcttttatctcattactttgagagccatcaccagcgactatgtcgtatgggtaaagcgcttatttatcgga

SEQ ID NO: 17 - RNA, 20 nt, synthetic construct
  misc_feature 1..20: note = spacer sequence
  source 1..20: mol_type = other RNA
aaggggctccgcaccacgcc

SEQ ID NO: 18 - RNA, 20 nt, synthetic construct
  misc_feature 1..20: note = spacer sequence
  source 1..20: mol_type = other RNA
aaggggctgcgtaccacacc

SEQ ID NO: 19-23 - skipped (5 entries)

SEQ ID NO: 24 - protein, 4 aa, synthetic construct
  REGION 1..4: note = linker polypeptide
PPPG

SEQ ID NO: 25 - protein, 23 aa, synthetic construct
  REGION 1..23: note = linker polypeptide
  VARIANT 8..11: note = grouped amino acid residues may be present or absent
  VARIANT 12..15: note = grouped amino acid residues may be present or absent
  VARIANT 16..19: note = grouped amino acid residues may be present or absent
  VARIANT 20..23: note = grouped amino acid residues may be present or absent
PPPGGGSGGGSGGGSGGGSGGGS

SEQ ID NO: 26 - protein, 23 aa, synthetic construct
  REGION 1..23: note = linker polypeptide
  VARIANT 1..4: note = grouped amino acid residues may be present or absent
  VARIANT 5..8: note = grouped amino acid residues may be present or absent
  VARIANT 9..12: note = grouped amino acid residues may be present or absent
  VARIANT 13..16: note = grouped amino acid residues may be present or absent
GGGSGGGSGGGSGGGSGGGSPPP

SEQ ID NO: 27 - protein, 12 aa, synthetic construct
  REGION 1..12: note = linker polypeptide
TPPKTKRKVEFE

SEQ ID NO: 28 - DNA, 60 bp, synthetic construct
  misc_feature 1..60: note = in vitro cleavage assay target
  source 1..60: mol_type = other DNA
tgaagctgacagcattcgggccgagatgtctcgctccgtggccttagctgtgctcgcgct

SEQ ID NO: 29 - DNA, 20 bp, synthetic construct
  misc_feature 1..20: note = spacer sequence
  source 1..20: mol_type = other DNA
tgtggtcggggtagcggctg

SEQ ID NO: 30 - DNA, 20 bp, synthetic construct
  misc_feature 1..20: note = spacer sequence
  source 1..20: mol_type = other DNA
tcaagtccgccatgcccgaa

SEQ ID NO: 31 - RNA, 19 nt, unidentified
  misc_feature 1..19: note = exogenous stem loop region
  source 1..19: mol_type = other RNA
acatgaggattacccatgt

SEQ ID NO: 32 - RNA, 18 nt, unidentified
  misc_feature 1..18: note = exogenous stem loop region
  source 1..18: mol_type = other RNA
tgcatgtctaagacagca

SEQ ID NO: 33 - RNA, 20 nt, unidentified
  misc_feature 1..20: note = exogenous stem loop region
  source 1..20: mol_type = other RNA
aatccattgcactccggatt

SEQ ID NO: 34 - RNA, 12 nt, unidentified
  misc_feature 1..12: note = exogenous stem loop region
  source 1..12: mol_type = other RNA
cctcttcggagg

SEQ ID NO: 35 - RNA, 21 nt, unidentified
  misc_feature 1..21: note = exogenous stem loop region
  source 1..21: mol_type = other RNA
aggagtttctatggaaaccct

SEQ ID NO: 36 - RNA, 30 nt, unidentified
  misc_feature 1..30: note = exogenous stem loop region
  source 1..30: mol_type = other RNA
aggtgggacgacctctcggtcgtcctatct

SEQ ID NO: 37 - RNA, 19 nt, unidentified
  misc_feature 1..19: note = exogenous stem loop region
  source 1..19: mol_type = other RNA
tgctcgctccgttcgagca

SEQ ID NO: 38 - RNA, 21 nt, unidentified
  misc_feature 1..21: note = exogenous stem loop region
  source 1..21: mol_type = other RNA
tgctcgacgcgtcctcgagca

SEQ ID NO: 39 - RNA, 22 nt, unidentified
  misc_feature 1..22: note = exogenous stem loop region
  source 1..22: mol_type = other RNA
tgctcgtttgcggctacgagca

SEQ ID NO: 40 - RNA, 17 nt, unidentified
  misc_feature 1..17: note = exogenous stem loop region
  source 1..17: mol_type = other RNA
agggagggagggagagg

SEQ ID NO: 41 - RNA, 19 nt, unidentified
  misc_feature 1..19: note = exogenous stem loop region
  source 1..19: mol_type = other RNA
ggttagggttagggttagg

SEQ ID NO: 42 - RNA, 25 nt, unidentified
  misc_feature 1..25: note = exogenous stem loop region
  source 1..25: mol_type = other RNA
ctgctcagtacgagaggaaccgcag

SEQ ID NO: 43 - RNA, 78 nt, unidentified
  misc_feature 1..78: note = exogenous stem loop region
  source 1..78: mol_type = other RNA
tacactgggatcgctgaattagagatcggcgtcctttcattctatatactttggagttttaaaatgtctctaagtaca

SEQ ID NO: 44 - protein, 979 aa, synthetic construct
  REGION 1..979: note = catalytically dead CasX variant
QEIKRINKIRRRLVKDSNTKKAGKTRGPMKTLLVRVMTPDLRERLENLRKKPENIPQPISNTSRANLNKLLTDYTEMKKAILHVYWEEFQKDPVGLMSRVAQPASKKIDQNKLKPEMDEKGNLTTAGFACSQCGQPLFVYKLEQVSEKGKAYTNYFGRCNVAEHEKLILLAQLKPEKDSDEAVTYSLGKFGQRALDFYSIHVTKESTHPVKPLAQIAGNRYASYPVGKALSDACMGTIASFLSKYQDIIIEHQKVVKGNQKRLESLRELAGKENLEYPSVTLPPQPHTKEGVDAYNEVIARVRMWVNLNLWQKLKLSRDDAKPLLRLKGFPSFPLVERQANEVDWWDMVCNVKKLINEKKEDGKVFWQNLAGYKRQEALRPYLSSEEDRKKGKKFARYQLGDLLLHLEKKHGEDWGKVYDEAWERIDKKVEGLSKHIKLEEERRSEDAQSKAALTDWLRAKASFVIEGLKEADKDEFCRCELKLQKWYGDLRGKPFAIEAENSILDISGFSKQYNCAFIWQKDGVKKLNLYLIINYFKGGKLRFKKIKPEAFEANRFYTVINKKSGEIVPMEVNFNFDDPNLIILPLAFGKRQGREFIWNDLLSLETGSLKLANGRVIEKTLYNRRTRQDEPALFVALTFERREVLDSSNIKPMNLIGVARGENIPAVIALTDPEGCPLSRFKDSLGNPTHILRIGESYKEKQRTIQAKKEVEQRRAGGYSRKYASKAKNLADDMVRNTARDLLYYAVTQDAMLIFANLSRGFGRQGKRTFMAERQYTRMEDWLTAKLAYEGLPSKTYLSKTLAQYTSKTCSNCGFTITSADYDRVLEKLKKTATGWMTTINGKELKVEGQITYYNRYKRQNVVKDLSVELDRLSEESVNNDISSWTKGRSGEALSLLKKRFSHRPVQEKFVCLNCGFETHAAEQAALNIARSWLFLRSQEYKKYQTNKTTGNTDKRAFVETWQSFYRKKLKEVWKPAV

SEQ ID NO: 45 - protein, 979 aa, synthetic construct
  REGION 1..979: note = catalytically dead CasX variant
QEIKRINKIRRRLVKDSNTKKAGKTRGPMKTLLVRVMTPDLRERLENLRKKPENIPQPISNTSRANLNKLLTDYTEMKKAILHVYWEEFQKDPVGLMSRVAQPASKKIDQNKLKPEMDEKGNLTTAGFACSQCGQPLFVYKLEQVSEKGKAYTNYFGRCNVAEHEKLILLAQLKPEKDSDEAVTYSLGKFGQRALDFYSIHVTKESTHPVKPLAQIAGNRYASGPVGKALSDACMGTIASFLSKYQDIIIEHQKVVKGNQKRLESLRELAGKENLEYPSVTLPPQPHTKEGVDAYNEVIARVRMWVNLNLWQKLKLSRDDAKPLLRLKGFPSFPLVERQANEVDWWDMVCNVKKLINEKKEDGKVFWQNLAGYKRQEALRPYLSSEEDRKKGKKFARYQLGDLLLHLEKKHGEDWGKVYDEAWERIDKKVEGLSKHIKLEEERRSEDAQSKAALTDWLRAKASFVIEGLKEADKDEFCRCELKLQKWYGDLRGKPFAIEAENSILDISGFSKQYNCAFIWQKDGVKKLNLYLIINYFKGGKLRFKKIKPEAFEANRFYTVINKKSGEIVPMEVNFNFDDPNLIILPLAFGKRQGREFIWNDLLSLETGSLKLANGRVIEKTLYNRRTRQDEPALFVALTFERREVLDSSNIKPMNLIGVARGENIPAVIALTDPEGCPLSRFKDSLGNPTHILRIGESYKEKQRTIQAKKEVEQRRAGGYSRKYASKAKNLADDMVRNTARDLLYYAVTQDAMLIFANLSRGFGRQGKRTFMAERQYTRMEDWLTAKLAYEGLPSKTYLSKTLAQYTSKTCSNCGFTITSADYDRVLEKLKKTATGWMTTINGKELKVEGQITYYNRYKRQNVVKDLSVELDRLSEESVNNDISSWTKGRSGEALSLLKKRFSHRPVQEKFVCLNCGFETHAAEQAALNIARSWLFLRSQEYKKYQTNKTTGNTDKRAFVETWQSFYRKKLKEVWKPAV

SEQ ID NO: 46 - protein, 978 aa, synthetic construct
  REGION 1..978: note = catalytically dead CasX variant
QEIKRINKIRRRLVKDSNTKKAGKTGPMKTLLVRVMTPDLRERLENLRKKPENIPQPISNTSRANLNKLLTDYTEMKKAILHVYWEEFQKDPVGLMSRVAQPASKKIDQNKLKPEMDEKGNLTTAGFACSQCGQPLFVYKLEQVSEKGKAYTNYFGRCNVAEHEKLILLAQLKPEKDSDEAVTYSLGKFGQRALDFYSIHVTKESTHPVKPLAQIAGNRYASNPVGKALSDACMGTIASFLSKYQDIIIEHQKVVKGNQKRLESLRELAGKENLEYPSVTLPPQPHTKEGVDAYNEVIARVRMWVNLNLWQKLKLSRDDAKPLLRLKGFPSFPLVERQANEVDWWDMVCNVKKLINEKKEDGKVFWQNLAGYKRQEALRPYLSSEEDRKKGKKFARYQLGDLLLHLEKKHGEDWGKVYDEAWERIDKKVEGLSKHIKLEEERRSEDAQSKAALTDWLRAKASFVIEGLKEADKDEFCRCELKLQKWYGDLRGKPFAIEAENSILDISGFSKQYNCAFIWQKDGVKKLNLYLIINYFKGGKLRFKKIKPEAFEANRFYTVINKKSGEIVPMEVNFNFDDPNLIILPLAFGKRQGREFIWNDLLSLETGSLKLANGRVIEKTLYNRRTRQDEPALFVALTFERREVLDSSNIKPMNLIGVARGENIPAVIALTDPEGCPLSRFKDSLGNPTHILRIGESYKEKQRTIQAKKEVEQRRAGGYSRKYASKAKNLADDMVRNTARDLLYYAVTQDAMLIFANLSRGFGRQGKRTFMAERQYTRMEDWLTAKLAYEGLPSKTYLSKTLAQYTSKTCSNCGFTITSADYDRVLEKLKKTATGWMTTINGKELKVEGQITYYNRYKRQNVVKDLSVELDRLSEESVNNDISSWTKGRSGEALSLLKKRFSHRPVQEKFVCLNCGFETHAAEQAALNIARSWLFLRSQEYKKYQTNKTTGNTDKRAFVETWQSFYRKKLKEVWKPAV

SEQ ID NO: 47 - protein, 979 aa, synthetic construct
  REGION 1..979: note = catalytically dead CasX variant
QEIKRINKIRRRLVKDSNTKKAGKTGPMKTLLVRVMTPDLRERLENLRKKPENIPQPISNTSRANLNKLLTDYTEMKKAILHVYWEEFQKDPVGLMSRVAQPASKKIDQNKLKPEMDEKGNLTTAGFACSQCGQPLFVYKLEQVSEKGKAYTNYFGRCNVAEHEKLILLAQLKPEKDSDEAVTYSLGKFGQRALDFYSIHVTKESTHPVKPLAQIAGNRYASGPVGKALSDACMGTIASFLSKYQDIIIEHQKVVKGNQKRLESLRELAGKENLEYPSVTLPPQPHTKEGVDAYNEVIARVRMWVNLNLWQKLKLSRDDAKPLLRLKGFPSFPLVERQANEVDWWDMVCNVKKLINEKKEDGKVFWQNLAGYKRQEALRPYLSSEEDRKKGKKFARYQLGDLLLHLEKKHGEDWGKVYDEAWERIDKKVEGLSKHIKLEEERRSEDAQSKAALTDWLRAKASFVIEGLKEADKDEFCRCELKLQKWYGDLRGKPFAIEAENSILDISGFSKQYNCAFIWQKDGVKKLNLYLIINYFKGYGKLRFKKIKPEAFEANRFYTVINKKSGEIVPMEVNFNFDDPNLIILPLAFGKRQGREFIWNDLLSLETGSLKLANGRVIEKTLYNRRTRQDEPALFVALTFERREVLDSSNIKPMNLIGVARGENIPAVIALTDPEGCPLSRFKDSLGNPTHILRIGESYKEKQRTIQAKKEVEQRRAGGYSRKYASKAKNLADDMVRNTARDLLYYAVTQDAMLIFANLSRGFGRQGKRTFMAERQYTRMEDWLTAKLAYEGLPSKTYLSKTLAQYTSKTCSNCGFTITSADYDRVLEKLKKTATGWMTTINGKELKVEGQITYYNRYKRQNVVKDLSVELDRLSEESVNNDISSWTKGRSGEALSLLKKRFSHRPVQEKFVCLNCGFETHAAEQAALNIARSWLFLRSQEYKKYQTNKTTGNTDKRAFVETWQSFYRKKLKEVWKPAV

SEQ ID NO: 48 - protein, 979 aa, synthetic construct
  REGION 1..979: note = catalytically dead CasX variant
QEIKRINKIRRRLVKDSNTKKAGKTGPMKTLLVRVMTPDLRERLENLRKKPENIPQPISNTSRANLNKLLTDYTEMKKAILHVYWEEFQKDPVGLMSRVAQPASKKIDQNKLKPEMDEKGNLTTAGFACSQCGQPLFVYKLEQVSEKGKAYTNYFGRCNVAEHEKLILLAQLKPEKDSDEAVTYSLGKFGQRALDFYSIHVTKESTHPVKPLAQIAGNRYASGPVGKALSDACMGTIASFLSKYQDIIIEHQKVVKGNQKRLESLRELAGKENLEYPSVTLPPQPHTKEGVDAYNEVIARVRMWVNLNLWQKLKLSRDDAKPLLRLKGFPSFPLVERQANEVDWWDMVCNVKKLINEKKEDGKVFWQNLAGYKRQEALRPYLSSEEDRKKGKKFARYQLGDLLLHLEKKHGEDWGKVYDEAWERIDKKVEGLSKHIKLEEERRSEDAQSKAALTDWLRAKASFVIEGLKEADKDEFCRCELKLQKWYGDLRGKPFAIEAENSILDISGFSKQYNCAFIWQKDGVKKLNLYLIINYFKGWGKLRFKKIKPEAFEANRFYTVINKKSGEIVPMEVNFNFDDPNLIILPLAFGKRQGREFIWNDLLSLETGSLKLANGRVIEKTLYNRRTRQDEPALFVALTFERREVLDSSNIKPMNLIGVARGENIPAVIALTDPEGCPLSRFKDSLGNPTHILRIGESYKEKQRTIQAKKEVEQRRAGGYSRKYASKAKNLADDMVRNTARDLLYYAVTQDAMLIFANLSRGFGRQGKRTFMAERQYTRMEDWLTAKLAYEGLPSKTYLSKTLAQYTSKTCSNCGFTITSADYDRVLEKLKKTATGWMTTINGKELKVEGQITYYNRYKRQNVVKDLSVELDRLSEESVNNDISSWTKGRSGEALSLLKKRFSHRPVQEKFVCLNCGFETHAAEQAALNIARSWLFLRSQEYKKYQTNKTTGNTDKRAFVETWQSFYRKKLKEVWKPAV

SEQ ID NO: 49 - protein, 978 aa, synthetic construct
  REGION 1..978: note = catalytically dead CasX variant
QEIKRINKIRRRLVKDSNTKKAGKTGPMKTLLVRVMTPDLRERLENLRKKPENIPQPISNTSRANLNKLLTDYTEMKKAILHVYWEEFQKDPVGLMSRVAQPASKKIDQNKLKPEMDEKGNLTTAGFACSQCGQPLFVYKLEQVSEKGKAYTNYFGRCNVAEHEKLILLAQLKPEKDSDEAVTYSLGKFGQRALDFYSIHVTKESTHPVKPLAQIAGNRYASYPVGKALSDACMGTIASFLSKYQDIIIEHQKVVKGNQKRLESLRELAGKENLEYPSVTLPPQPHTKEGVDAYNEVIARVRMWVNLNLWQKLKLSRDDAKPLLRLKGFPSFPLVERQANEVDWWDMVCNVKKLINEKKEDGKVFWQNLAGYKRQEALRPYLSSEEDRKKGKKFARYQLGDLLLHLEKKHGEDWGKVYDEAWERIDKKVEGLSKHIKLEEERRSEDAQSKAALTDWLRAKASFVIEGLKEADKDEFCRCELKLQKWYGDLRGKPFAIEAENSILDISGFSKQYNCAFIWQKDGVKKLNLYLIINYFKGGKLRFKKIKPEAFEANRFYTVINKKSGEIVPMEVNFNFDDPNLIILPLAFGKRQGREFIWNDLLSLETGSLKLANGRVIEKTLYNRRTRQDEPALFVALTFERREVLDSSNIKPMNLIGVARGENIPAVIALTDPEGCPLSRFKDSLGNPTHILRIGESYKEKQRTIQAKKEVEQRRAGGYSRKYASKAKNLADDMVRNTARDLLYYAVTQDAMLIFANLSRGFGRQGKRTFMAERQYTRMEDWLTAKLAYEGLPSKTYLSKTLAQYTSKTCSNCGFTITSADYDRVLEKLKKTATGWMTTINGKELKVEGQITYYNRYKRQNVVKDLSVELDRLSEESVNNDISSWTKGRSGEALSLLKKRFSHRPVQEKFVCLNCGFETHAAEQAALNIARSWLFLRSQEYKKYQTNKTTGNTDKRAFVETWQSFYRKKLKEVWKPAV

SEQ ID NO: 50 - protein, 978 aa, synthetic construct
  REGION 1..978: note = catalytically dead CasX variant
QEIKRINKIRRRLVKDSNTKKAGKTRGPMKTLLVRVMTPDLRERLENLRKKPENIPQPISNTSRANLNKLLTDYTEMKKAILHVYWEEFQKDPVGLMSRVAQPASKKIDQNKLKPEMDEKGNLTTAGFACSQCGQPLFVYKLEQVSEKGKAYTNYFGRCNVAEHEKLILLAQLKPEKDSDEAVTYSLGKFGQRALDFYSIHVTKESTHPVKPLAQIAGNRYASGPVGKALSDACMGTIASFLSKYQDIIIEHQKVVKGNQKRLESLRELAGKENLEYPSVTLPPQPHTKEGVDAYNEVIARVRMWVNLNLWQKLKLSRDDAKPLLRLKGFPSFPLVERQANEVDWWDMVCNVKKLINEKKEDGKVFWQNLAGYKRQEALRPYLSSEEDRKKGKKFARYQLGDLLLHLEKKHGEDWGKVYDEAWERIDKKVEGLSKHIKLEEERRSEDAQSKAALTDWLRAKASFVIEGLKEADKDEFCRCELKLQKWYGDLRGKPFAIEAENSILDISGFSKQYNCAFIWQKDGVKKLNLYLIINYFKGGKLRFKKIKPEAFEANRFYTVINKKSGEIVPMEVNFNFDDPNLIILPLAFGKRQGREFIWNDLLSLETGSLKLANGRVIEKTLYNRRTRQDEPALFVALTFERREVLDSSNIKPMNLIGVARGENIPAVIALTDPEGCPLSRFKDSLGNPTHILRIGESYKEKQRTIQAKKEVEQRRAGGYSRKYASKAKNLADDMVRNTARDLLYYAVTQDAMLIFANLSRGFGRQGKRTFMAERQYTRMEDWLTAKLAYEGLSKTYLSKTLAQYTSKTCSNCGFTITSADYDRVLEKLKKTATGWMTTINGKELKVEGQITYYNRYKRQNVVKDLSVELDRLSEESVNNDISSWTKGRSGEALSLLKKRFSHRPVQEKFVCLNCGFETHAAEQAALNIARSWLFLRSQEYKKYQTNKTTGNTDKRAFVETWQSFYRKKLKEVWKPAV

SEQ ID NO: 51 - protein, 978 aa, synthetic construct
  REGION 1..978: note = catalytically dead CasX variant
QEIKRINKIRRRLVKDSNTKKAGKTGPMKTLLVRVMTPDLRERLENLRKKPENIPQPISNTSRANLNKLLTDYTEMKKAILHVYWEEFQKDPVGLMSRVAQPASKKIDQNKLKPEMDEKGNLTTAGFACSQCGQPLFVYKLEQVSEKGKAYTNYFGRCNVAEHEKLILLAQLKPEKDSDEAVTYSLGKFGQRALDFYSIHVTKESTHPVKPLAQIAGNRYASGPVGKALSDACMGTIASFLSKYQDIIIEHQKVVKGNQKRLESLRELAGKENLEYPSVTLPPQPHTKEGVDAYNEVIARVRMWVNLNLWQKLKLSRDDAKPLLRLKGFPSFPLVERQANEVDWWDMVCNVKKLINEKKEDGKVFWQNLAGYKRQEALRPYLSSEEDRKKGKKFARYQLGDLLLHLEKKHGEDWGKVYDEAWERIDKKVEGLSKHIKLEEERRSEDAQSKAALTDWLRAKASFVIEGLKEADKDEFCRCELKLQKWYGDLRGKPFAIEAENSILDISGFSKQYNCAFIWQKDGVKKLNLYLIINYFKGGKLRFKKIKPEAFEANRFYTVINKKSGEIVPMEVNFNFDDPNLIILPLAFGKRQGREFIWNDLLSLETGSLKLANGRVIEKTLYNRRTRQDEPALFVALTFERREVLDSSNIKPMNLIGVARGENIPAVIALTDPEGCPLSRFKDSLGNPTHILRIGESYKEKQRTIQAKKEVEQRRAGGYSRKYASKAKNLADDMVRNTARDLLYYAVTQDAMLIFANLSRGFGRQGKRTFMAERQYTRMEDWLTAKLAYEGLPSKTYLSKTLAQYTSKTCSNCGFTITSADYDRVLEKLKKTATGWMTTINGKELKVEGQITYYNRYKRQNVVKDLSVELDRLSEESVNNDISSWTKGRSGEALSLLKKRFSHRPVQEKFVCLNCGFETHAAEQAALNIARSWLFLRSQEYKKYQTNKTTGNTDKRAFVETWQSFYRKKLKEVWKPAV

SEQ ID NO: 52 - protein, 978 aa, synthetic construct
  REGION 1..978: note = catalytically dead CasX variant
QEIKRINKIRRRLVKDSNTKKAGKTGPMKTLLVRVMTPDLRERLENLRKKPENIPQPISNTSRANLNKLLTDYTEMKKAILHVYWEEFQKDPVGLMSRVAQPASKKIDQNKLKPEMDEKGNLTTAGFACSQCGQPLFVYKLEQVSEKGKAYTNYFGRCNVAEHEKLILLAQLKPEKDSDEAVTYSLGKFGQRALDFYSIHVTKESTHPVKPLAQIAGNRYASGPVGKALSDACMGTIASFLSKYQDIIIEHQKVVKGNQKRLESLRELAGKENLEYPSVTLPPQPHTKEGVDAYNEVIARVRMWVNLNLWQKLKLSRDDAKPLLRLKGFPSFPLVERQANEVDWWDMVCNVKKLINEKKEDGKVFWQNLAGYKRQEALRPYLSSEEDRKKGKKFARYQLGDLLLHLEKKHGEDWGKVYDEAWERIDKKVEGLSKHIKLEEERRSEDAQSKAALTDWLRAKASFVIEGLKEADKDEFCRCELKLQKWYGDLRGKPFAIEAENSILDISGFSKQYNCAFIWQKDGVKKLNLYLIINYFKGGKLRFKKIKPEAFEANRFYTVINKKSGEIVPMEVNFNFDDPNLIILPLAFGKRQGREFIWNDLLSLETGSLKLANGRVIEKTLYNRRTRQDEPALFVALTFERREVLDSSNIKPMNLIGVARGENIPAVIALTDPEGCPLSRFKDSLGNPTHILRIGESYKEKQRTIQAKKEVEQRRAGGYSRKYASKAKNLADDMVRNTARDLLYYAVTQDAMLIFANLSRGFGRQGKRTFMAERQYTRMEDWLTAKLAYEGLSKTYLSKTLAQYTSKTCSNCGFTIHTSADYDRVLEKLKKTATGWMTTINGKELKVEGQITYYNRYKRQNVVKDLSVELDRLSEESVNNDISSWTKGRSGEALSLLKKRFSHRPVQEKFVCLNCGFETHAAEQAALNIARSWLFLRSQEYKKYQTNKTTGNTDKRAFVETWQSFYRKKLKEVWKPAV

SEQ ID NO: 53 - protein, 977 aa, synthetic construct
  REGION 1..977: note = catalytically dead CasX variant
QEIKRINKIRRRLVKDSNTKKAGKTGPMKTLLVRVMTPDLRERLENLRKKPENIPQPISNTSRANLNKLLTDYTEMKKAILHVYWEEFQKDPVGLMSRVAQPASKKIDQNKLKPEMDEKGNLTTAGFACSQCGQPLFVYKLEQVSEKGKAYTNYFGRCNVAEHEKLILLAQLKPEKDSDEAVTYSLGKFGQRALDFYSIHVTKESTHPVKPLAQIAGNRYASGPVGKALSDACMGTIASFLSKYQDIIIEHQKVVKGNQKRLESLRELAGKENLEYPSVTLPPQPHTKEGVDAYNEVIARVRMWVNHNLWQKLKLSRDDAKPLLRLKGFPSFPLVERQANEVDWWDMVCNVKKLINEKKEDGKVFWQNLAGYKRQEALRPYLSSEEDRKKGKKFARYQLGDLLLHLEKKHGEDWGKVYDEAWERIDKKVEGLSKHIKLEEERRSEDAQSKAALTDWLRAKASFVIEGLKEADKDEFCRCELKLQKWYGDLRGKPFAIEAENSILDISGFSKQYNCAFIWQKDGVKKLNLYLIINYFKGGKLRFKKIKPEAFEANRFYTVINKKSGEIVPMEVNFNFDDPNLIILPLAFGKRQGREFIWNDLLSLETGSLKLANGRVIEKTLYNRRTRQDEPALFVALTFERREVLDSSNIKPMNLIGVARGENIPAVIALTDPEGCPLSRFKDSLGNPTHILRIGESYKEKQRTIQAKKEVEQRRAGGYSRKYASKAKNLADDMVRNTARDLLYYAVTQDAMLIFANLSRGFGRQGKRTFMAERQYTRMEDWLTAKLAYEGLSKTYLSKTLAQYTSKTCSNCGFTITSADYDRVLEKLKKTATGWMTTINGKELKVEGQITYYNRYKRQNVVKDLSVELDRLSEESVNNDISSWTKGRSGEALSLLKKRFSHRPVQEKFVCLNCGFETHAAEQAALNIARSWLFLRSQEYKKYQTNKTTGNTDKRAFVETWQSFYRKKLKEVWKPAV

SEQ ID NO: 54 - protein, 978 aa, synthetic construct
  REGION 1..978: note = catalytically dead CasX variant
QEIKRINKIRRRLVKDSNTKKAGKTGPMKTLLVRVMTPDLRERLENLRKKPENIPQPISNTSRANLNKLLTDYTEMKKAILHVYWEEFQKDPVGLMSRVAQPASKKIDQNKLKPEMDEKGNLTTAGFACSQCGQPLFVYKLEQVSEKGKAYTNYFGRCNVAEHEKLILLAQLKPEKDSDEAVTYSLGKFGQRALDFYSIHVTKESTHPVKPLAQIAGNRYASGAPVGKALSDACMGTIASFLSKYQDIIIEHQKVVKGNQKRLESLRELAGKENLEYPSVTLPPQPHTKEGVDAYNEVIARVRMWVNLNLWQKLKLSRDDAKPLLRLKGFPSFPLVERQANEVDWWDMVCNVKKLINEKKEDGKVFWQNLAGYKRQEALRPYLSSEEDRKKGKKFARYQLGDLLLHLEKKHGEDWGKVYDEAWERIDKKVEGLSKHIKLEEERRSEDAQSKAALTDWLRAKASFVIEGLKEADKDEFCRCELKLQKWYGDLRGKPFAIEAENSILDISGFSKQYNCAFIWQKDGVKKLNLYLIINYFKGGKLRFKKIKPEAFEANRFYTVINKKSGEIVPMEVNFNFDDPNLIILPLAFGKRQGREFIWNDLLSLETGSLKLANGRVIEKTLYNRRTRQDEPALFVALTFERREVLDSSNIKPMNLIGVARGENIPAVIALTDPEGCPLSRFKDSLGNPTHILRIGESYKEKQRTIQAKKEVEQRRAGGYSRKYASKAKNLADDMVRNTARDLLYYAVTQDAMLIFANLSRGFGRQGKRTFMAERQYTRMEDWLTAKLAYEGLSKTYLSKTLAQYTSKTCSNCGFTITSADYDRVLEKLKKTATGWMTTINGKELKVEGQITYYNRYKRQNVVKDLSVELDRLSEESVNNDISSWTKGRSGEALSLLKKRFSHRPVQEKFVCLNCGFETHAAEQAALNIARSWLFLRSQEYKKYQTNKTTGNTDKRAFVETWQSFYRKKLKEVWKPAV

SEQ ID NO: 55 - protein, 979 aa, synthetic construct
  REGION 1..979: note = catalytically dead CasX variant
RQEIKRINKIRRRLVKDSNTKKAGKTGPMKTLLVRVMTPDLRERLENLRKKPENIPQPISNTSRANLNKLLTDYTEMKKAILHVYWEEFQKDPVGLMSRVAQPASKKIDQNKLKPEMDEKGNLTTAGFACSQCGQPLFVYKLEQVSEKGKAYTNYFGRCNVAEHEKLILLAQLKPEKDSDEAVTYSLGKFGQRALDFYSIHVTKESTHPVKPLAQIAGNRYASGAPVGKALSDACMGTIASFLSKYQDIIIEHQKVVKGNQKRLESLRELAGKENLEYPSVTLPPQPHTKEGVDAYNEVIARVRMWVNLNLWQKLKLSRDDAKPLLRLKGFPSFPLVERQANEVDWWDMVCNVKKLINEKKEDGKVFWQNLAGYKRQEALRPYLSSEEDRKKGKKFARYQLGDLLLHLEKKHGEDWGKVYDEAWERIDKKVEGLSKHIKLEEERRSEDAQSKAALTDWLRAKASFVIEGLKEADKDEFCRCELKLQKWYGDLRGKPFAIEAENSILDISGFSKQYNCAFIWQKDGVKKLNLYLIINYFKGGKLRFKKIKPEAFEANRFYTVINKKSGEIVPMEVNFNFDDPNLIILPLAFGKRQGREFIWNDLLSLETGSLKLANGRVIEKTLYNRRTRQDEPALFVALTFERREVLDSSNIKPMNLIGVARGENIPAVIALTDPEGCPLSRFKDSLGNPTHILRIGESYKEKQRTIQAKKEVEQRRAGGYSRKYASKAKNLADDMVRNTARDLLYYAVTQDAMLIFANLSRGFGRQGKRTFMAERQYTRMEDWLTAKLAYEGLSKTYLSKTLAQYTSKTCSNCGFTITSADYDRVLEKLKKTATGWMTTINGKELKVEGQITYYNRYKRQNVVKDLSVELDRLSEESVNNDISSWTKGRSGEALSLLKKRFSHRPVQEKFVCLNCGFETHAAEQAALNIARSWLFLRSQEYKKYQTNKTTGNTDKRAFVETWQSFYRKKLKEVWKPAV

SEQ ID NO: 56 - protein, 978 aa, synthetic construct
  REGION 1..978: note = catalytically dead CasX variant
QEIKRINKIRRRLVKDSNTKKAGKTGPMKTLLVRVMTPDLRERLENLRKKPENIPQPISNTSRANLNKLLTDYTEMKKAILHVYWEEFQKDPVGLMSRVAQPASKKIDQNKLKPEMDEKGNLTTAGFACSQCGQPLFVYKLEQVSEKGKAYTNYFGRCNVAEHEKLILLAQLKPEKDSDEAVTYSLGKFGQRALDFYSIHVTKESTHPVKPLAQIAGNRYASGPVGKALSDACMGTIASFLSKYQDIIIEHQKVVKGNQKRLESLRELAGKENLEYPSVTLPPQPHTKEGVDAYNEVIARVRMWVNLNLWQKLKLSRDDAKPLLRLKGFPSFPLVERQANEVDWWDMVCNVKKLINEKKEDGKVFWQNLAGYKRQEALRPYLSSEEDRKKGKKFARYQLGDLLLHLEKKHGEDWGKVYDEAWERIDKKVEGLSKHIKLEEERRSEDAQSKAALTDWLRAKASFVIEGLKEADKDEFCRCELKLQKWYGDLRGKPFAIEAENSILDISGFSKQYNCAFIWQKDGVKKLNLYLIINYFKGGKLRFKKIKPEAFEANRFYTVINKKSGEIVPMEVNFNFDDPNLIILPLAFGKRQGREFIWNDLLSLETGSLKLANGRVIEKTLYNRRTRQDEPALFVALTFERREVLDSSNIKPMNLIGVARGENIPAVIALTDPEGCPLSRFKDSLGNPTHIQLRIGESYKEKQRTIQAKKEVEQRRAGGYSRKYASKAKNLADDMVRNTARDLLYYAVTQDAMLIFANLSRGFGRQGKRTFMAERQYTRMEDWLTAKLAYEGLSKTYLSKTLAQYTSKTCSNCGFTITSADYDRVLEKLKKTATGWMTTINGKELKVEGQITYYNRYKRQNVVKDLSVELDRLSEESVNNDISSWTKGRSGEALSLLKKRFSHRPVQEKFVCLNCGFETHAAEQAALNIARSWLFLRSQEYKKYQTNKTTGNTDKRAFVETWQSFYRKKLKEVWKPAV

SEQ ID NO: 57 - protein, 977 aa, synthetic construct
  REGION 1..977: note = catalytically dead CasX variant
QEIKRINKIRRRLVKDSNTKKAGKTGPMKTLLVRVMTPDLRERLENLRKKPENIPQPISNTSRANLNKLLTDYTEMKKAILHVYWEEFQKDPVGLMSRVAQPASKKIDQNKLKPEMDEKGNLTTAGFACSQCGQPLFVYKLEQVSEKGKAYTNYFGRCNVAEHEKLILLAQLKPEKDSDEAVTYSLGKFGQRALDFYSIHVTKESTHPVKPLAQIAGNRYASGPVGKALSDACMGTIASFLSKYQDIIIEHQKVVKGNQKRLESLRELAGKENLEYPSVTLPPQPHTKEGVDAYNEVIARVRMWVNLNLWQKLKLSRDDAKPLLRLKGFPSFPLVERQANEVDWWDMVCNVKKLINEKKEDGKVFWQNLAGYKRQEALRPYLSSEEDRKKGKKFARYQLGDLLLHLEKKHGEDWGKVYDEAWERIDKKVEGLSKHIKLEEERRSEDAQSKAALTDWLRAKASFVIEGLKEADKDEFCRCELKLQKWYGDLRGKPFAIEAENSILDISGFSKQYNCAFIWQKDGVKKLNLYLIINYFKGGKLRFKKIKPEAFEANRFYTVINKKSGEIVPMEVNFNFDDPNLIILPLAFGKRQGREFIWNDLLSLETGSLKLANGRVIEKTLYNRRTRQDEPALFVALTFERREVLDSSNIKPMNLIGVARGENIPAVIALTDPEGCPLSRFKDSLGNPTHILRIGESYKEKQRTTQAKKEVEQRRAGGYSRKYASKAKNLADDMVRNTARDLLYYAVTQDAMLIFANLSRGFGRQGKRTFMAERQYTRMEDWLTAKLAYEGLSKTYLSKTLAQYTSKTCSNCGFTITSADYDRVLEKLKKTATGWMTTINGKELKVEGQITYYNRYKRQNVVKDLSVELDRLSEESVNNDISSWTKGRSGEALSLLKKRFSHRPVQEKFVCLNCGFETHAAEQAALNIARSWLFLRSQEYKKYQTNKTTGNTDKRAFVETWQSFYRKKLKEVWKPAV

SEQ ID NO: 58 - protein, 977 aa, synthetic construct
  REGION 1..977: note = catalytically dead CasX variant
QEIKRINKIRRRLVKDSNTKKAGKTGPMKTLLVRVMTPDLRERLENLRKKPENIPQPISNTSRANLNKLLTDYTEMKKAILHVYWEEFQKDPVGLMSRVAQPASKKIDQNKLKPEMDEKGNLTTAGFACSQCGQPLFVYKLEQVSEKGKAYTNYFGRCNVAEHEKLILLAQLKPEKDSDEAVTYSLGKFGQRALDFYSIHVTKESTHPVKPLAQIAGNRYASGPVGKALSDACMGTIASFLSKYQDIIIEHQKVVKGNQKRLESLRELAGKENLEYPSVTLPPQPHTKEGVDAYNEVIARVRMWVNLNLWQKLKLSRDDAKPLLRLKGFPSFPLVERQANEVDWWDMVCNVKKLINEKKEDGKVFWQNLAGYKRQEALRPYLSSEEDRKKGKKFARYQLGDLLLHLEKKHGEDWGKVYDEAWERIDKKVEGLSKHIKLEEERRSEDAQSKAALTDWLRAKASFVIEGLKEADKDEFCRCELKLQKWYGDLRGKPFAIEAENSILDISGFSKQYNCAFIWQKDGVKKLNLYLIINYFKGGKLRFKKIKPEAFEANRFYTVINKKSGEIVPMEVNFNFDDPNLIILPLAFGKRQGREFIWNDLLSLETGSLKLANGRVIEKTLYNRRTRQDEPALFVALTFERREVLDSSNIKPMNLIGVARGENIPAVIALTDPEGCPLSRFKRSLGNPTHILRIGESYKEKQRTIQAKKEVEQRRAGGYSRKYASKAKNLADDMVRNTARDLLYYAVTQDAMLIFANLSRGFGRQGKRTFMAERQYTRMEDWLTAKLAYEGLSKTYLSKTLAQYTSKTCSNCGFTITSADYDRVLEKLKKTATGWMTTINGKELKVEGQITYYNRYKRQNVVKDLSVELDRLSEESVNNDISSWTKGRSGEALSLLKKRFSHRPVQEKFVCLNCGFETHAAEQAALNIARSWLFLRSQEYKKYQTNKTTGNTDKRAFVETWQSFYRKKLKEVWKPAV

SEQ ID NO: 59 - protein, 977 aa, synthetic construct
  REGION 1..977: note = catalytically dead CasX variant
QEIKRINKIRRRLVKDSNTKKAGKTYPMKTLLVRVMTPDLRERLENLRKKPENIPQPISNTSRANLNKLLTDYTEMKKAILHVYWEEFQKDPVGLMSRVAQPASKKIDQNKLKPEMDEKGNLTTAGFACSQCGQPLFVYKLEQVSEKGKAYTNYFGRCNVAEHEKLILLAQLKPEKDSDEAVTYSLGKFGQRALDFYSIHVTKESTHPVKPLAQIAGNRYASGPVGKALSDACMGTIASFLSKYQDIIIEHQKVVKGNQKRLESLRELAGKENLEYPSVTLPPQPHTKEGVDAYNEVIARVRMWVNLNLWQKLKLSRDDAKPLLRLKGFPSFPLVERQANEVDWWDMVCNVKKLINEKKEDGKVFWQNLAGYKRQEALRPYLSSEEDRKKGKKFARYQLGDLLLHLEKKHGEDWGKVYDEAWERIDKKVEGLSKHIKLEEERRSEDAQSKAALTDWLRAKASFVIEGLKEADKDEFCRCELKLQKWYGDLRGKPFAIEAENSILDISGFSKQYNCAFIWQKDGVKKLNLYLIINYFKGGKLRFKKIKPEAFEANRFYTVINKKSGEIVPMEVNFNFDDPNLIILPLAFGKRQGREFIWNDLLSLETGSLKLANGRVIEKTLYNRRTRQDEPALFVALTFERREVLDSSNIKPMNLIGVARGENIPAVIALTDPEGCPLSRFKDSLGNPTHILRIGESYKEKQRTIQAKKEVEQRRAGGYSRKYASKAKNLADDMVRNTARDLLYYAVTQDAMLIFANLSRGFGRQGKRTFMAERQYTRMEDWLTAKLAYEGLSKTYLSKTLAQYTSKTCSNCGFTITSADYDRVLEKLKKTATGWMTTINGKELKVEGQITYYNRYKRQNVVKDLSVELDRLSEESVNNDISSWTKGRSGEALSLLKKRFSHRPVQEKFVCLNCGFETHAAEQAALNIARSWLFLRSQEYKKYQTNKTTGNTDKRAFVETWQSFYRKKLKEVWKPAV

SEQ ID NO: 60 - protein, 977 aa, synthetic construct
  REGION 1..977: note = catalytically dead CasX variant
QEIKRINKIRRRLVKDSNTKKAGKTGPMKTLLVRVMTPDLRERLENLRKKPENIPQPISNTSRANLNKLLTDYTEMKKAILHVYWEEFQKDPVGLMSRVAQPASKKIDQNKLKPEMDEKGNLTTAGFACSQCGQPLFVYKLEQVSEKGKAYTNYFGRCNVAEHEKLILLAQLKPEKDSDEAVTYSLGKFGQRALDFYSIHVTKESTHPVKPLAQIAGNRYASGPVGKALSDACMGTIASFLSKYQDIIIEHQKVVKGNQKRLESLRELAGKENLEYPSVTLPPQPHTKEGVDAYNEVIARVRMWVNLNLWQKLKLSRDDAKPLLRLKGFPSFPLVERQANEVDWWDMVCNVKKLINEKKEDGKVFWQNLAGYKRQEALRPYLSSEEDRKKGKKFARYQLGDLLLHLEKKHGEDWGKVYDEAWERIDKKVEGLSKHIKLEEERRSEDAQSKAALTDWLRAKASFVIEGLKEADKDEFCRCELKLQKWYGDLRGKPFAIEAENSILDISGFSKQYNCAFIWQKDGVKKLNLYLIINYFKGGKLRFKKIKPEAFEANRFYTVINKKSGEIVPMEVNFNFDDPNLIILPLAFGKRQGREFIWNDLLSLETGSLKLANGRVIEKTLYNRRTRQDEPALFVALTFERREVLDSSNIKPMNLIGVARGENIPAVIALTDPEGCPLSRFKDSLGNPTHILRIGESYKEKQRTIQAKKEVEQRRAGGYSRKYASKAKNLADDMVRNTARDLLYYAVTQDAMLIFANLSRGFGRQGKRTFMAERQYTRMEDWLTAKLAYEGLSKTYLSKTLAQYTSKTCSNCGFTIHSADYDRVLEKLKKTATGWMTTINGKELKVEGQITYYNRYKRQNVVKDLSVELDRLSEESVNNDISSWTKGRSGEALSLLKKRFSHRPVQEKFVCLNCGFETHAAEQAALNIARSWLFLRSQEYKKYQTNKTTGNTDKRAFVETWQSFYRKKLKEVWKPAV

SEQ ID NO: 61 - protein, 977 aa, synthetic construct
  REGION 1..977: note = catalytically dead CasX variant
QEIKRINKIRRRLVKDSNTKKAGKTGPMKTLLVRVMTPDLRERLENLRKKPENIPQPISNTSRANLNKLLTDYTEMKKAILHVYWEEFQKDPVGLMSRVAQPASKKIDQNKLKPEMDEKGNLTTAGFACSQCGQPLFVYKLEQVSEKGKAYTNYFGRCNVAEHEKLILLAQLKPEKDSDEAVTYSLGKFGQRALDFYSIHVTKESTHPVKPLAQIAGNRYASGPVGKALSDACMGTIASFLSKYQDIIIEHQKVVKGNQKRLESLRELAGKENLEYPSVTLPPQPHTKEGVDAYNEVIARVRMWVNLNLWQKLKLSRDDAKPLLRLKGFPSFPLVERQANEVDWWDMVCNVKKLINEKKEDGKVFWQNLAGYKRQEALRPYLSSEEDRKKGKKFARYQLGDLLLHLEKKHGEDWGKVYDEAWERIDKKVEGLSKHIKLEEERRSEDAQSKAALTDWLRAKASFVIEGLKEADKDEFCRCELKLQKWYGDLRGKPFAIEAENSILDISGFSKQYNCAFIWQKDGVKKLNLYLIINYFKGGKLRFKKIKPEAFEANRFYTVINKKSGEIVPMEVNFNFDDPNLIILPLAFGKRQGREFIWNDLLSLETGSLKLANGRVIEKTLYNRRTRQDEPALFVALTFERREVLDSSNIKPMNLIGVARGENIPAVIALTDPEGCPLSRFKDSLGNPTHILRIGESYKEKQRTIQAKKEVEQRRAGGYSRKYASKAKNLADDMVRNTARDLLYYAATQDAMLIFANLSRGFGRQGKRTFMAERQYTRMEDWLTAKLAYEGLSKTYLSKTLAQYTSKTCSNCGFTITSADYDRVLEKLKKTATGWMTTINGKELKVEGQITYYNRYKRQNVVKDLSVELDRLSEESVNNDISSWTKGRSGEALSLLKKRFSHRPVQEKFVCLNCGFETHAAEQAALNIARSWLFLRSQEYKKYQTNKTTGNTDKRAFVETWQSFYRKKLKEVWKPAV

SEQ ID NO: 62 - protein, 977 aa, synthetic construct
  REGION 1..977: note = catalytically dead CasX variant
QEIKRINKIRRRLVKDSNTKKAGKTGPMKTLLVRVMTPDLRERLENLRKKPENIPQPISNTSRANLNKLLTDYTEMKKAILHVYWEEFQKDPVGLMSRVAQPASKKIDQNKLKPEMDEKGNLTTAGFACSQCGQPLFVYKLEQVSEKGKAYTNYFGRCNVAEHEKLILLAQLKPEKDSDEAVTYSLGKFGQRALDFYSIHVTKESTHPVKPLAQIAGNRYASGPVGKALSDACMGTIASFLSKYQDIIIEHQKVVKGNQKRLESLRELAGKENLEYPSVTLPPQPHTKEGVDAYNEVIARVRMWVNLNLWQKLKLSRDDAKPLLRLKGFPSFPLVERQANEVDWWDMVCNVKKLINEKKEDGKVFWQNLAGYKRQEALRPYLSSEEDRKKGKKFARYQLGDLLLHLEKKHGEDWGKVYDEAWERIDKKVEGLSKHIKLEEERRSEDAQSKAALTDWLRAKASFVIEGLKEADKDEFCRCELKLQKWYGDLRGKPFAIEAENSILDISGFSKQYNCAFIWQKDGVKKLNLYLIINYFKGGKLRFKKIKPEAFEANRFYTVINKKSGEIVPMEVNFNFDDPNLIILPLAFGKRQGREFIWNDLLSLETGSLKLANGRVIEKTLYNRRTRQDEPALFVALTFERREVLDSSNIKPMNLIGVARGENIPAVIALTDPEGCPLSRFKDSLGNPTHILRIGESYKEKQRTIQAAKEVEQRRAGGYSRKYASKAKNLADDMVRNTARDLLYYAVTQDAMLIFANLSRGFGRQGKRTFMAERQYTRMEDWLTAKLAYEGLSKTYLSKTLAQYTSKTCSNCGFTITSADYDRVLEKLKKTATGWMTTINGKELKVEGQITYYNRYKRQNVVKDLSVELDRLSEESVNNDISSWTKGRSGEALSLLKKRFSHRPVQEKFVCLNCGFETHAAEQAALNIARSWLFLRSQEYKKYQTNKTTGNTDKRAFVETWQSFYRKKLKEVWKPAV

SEQ ID NO: 63 - protein, 11 aa, synthetic construct
  REGION 1..11: note = nuclear localization signal
PAKRARRGYKC

SEQ ID NO: 64 - protein, 11 aa, synthetic construct
  REGION 1..11: note = nuclear localization signal
KLGPRKATGRW

SEQ ID NO: 65 - protein, 7 aa, synthetic construct
  REGION 1..7: note = nuclear localization signal
PRRKREE

SEQ ID NO: 66 - protein, 7 aa, synthetic construct
  REGION 1..7: note = nuclear localization signal
PYRGRKE

SEQ ID NO: 67 - protein, 8 aa, synthetic construct
  REGION 1..8: note = nuclear localization signal
PLRKRPRR

SEQ ID NO: 68 - protein, 18 aa, synthetic construct
  REGION 1..18: note = nuclear localization signal
PLRKRPRRGSPLRKRPRR

SEQ ID NO: 69 - protein, 29 aa, synthetic construct
  REGION 1..29: note = nuclear localization signal
PAAKRVKLDGGKRTADGSEFESPKKKRKV

SEQ ID NO: 70 - protein, 37 aa, synthetic construct
  REGION 1..37: note = nuclear localization signal
PAAKRVKLDGGKRTADGSEFESPKKKRKVGIHGVPAA

SEQ ID NO: 71 - protein, 46 aa, synthetic construct
  REGION 1..46: note = nuclear localization signal
PAAKRVKLDGGKRTADGSEFESPKKKRKVAEAAAKEAAAKEAAAKA

SEQ ID NO: 72 - protein, 31 aa, synthetic construct
  REGION 1..31: note = nuclear localization signal
PAAKRVKLDGGKRTADGSEFESPKKKRKVPG

SEQ ID NO: 73 - protein, 15 aa, synthetic construct
  REGION 1..15: note = nuclear localization signal
KRKGSPERGERKRHW

SEQ ID NO: 74 - protein, 28 aa, synthetic construct
  REGION 1..28: note = nuclear localization signal
KRTADSQHSTPPKTKRKVEFEPKKKRKV

SEQ ID NO: 75 - protein, 38 aa, synthetic construct
  REGION 1..38: note = nuclear localization signal
PKKKRKVGGSKRTADSQHSTPPKTKRKVEFEPKKKRKV

SEQ ID NO: 76 - DNA, 2931 bp, synthetic construct
  misc_feature 1..2931: note = CasX variant
  source 1..2931: mol_type = other DNA
caagagatcaagagaatcaacaagatcagaaggagactggtcaaggacagcaacacaaagaaggccggcaagacaggccccatgaaaaccctgctcgtcagagtgatgacccctgacctgagagagcggctggaaaacctgagaaagaagcccgagaacatccctcagcctatcagcaacaccagcagggccaacctgaacaagctgctgaccgactacaccgagatgaagaaagccatcctgcacgtgtactgggaagagttccagaaagaccccgtgggcctgatgagcagagttgctcagcctgccagcaagaagatcgaccagaacaagctgaagcccgagatggacgagaagggcaatctgaccacagccggctttgcctgctctcagtgtggccagcctctgttcgtgtacaagctggaacaggtgtccgagaaaggcaaggcctacaccaactacttcggcagatgtaacgtggccgagcacgagaagctgattctgctggcccagctgaaacctgagaaggactctgatgaggccgtgacctacagcctgggcaagtttggacagagagccctggacttctacagcatccacgtgaccaaagaaagcacacaccccgtgaagcccctggctcagatcgccggcaatagatacgcctctggacctgtgggcaaagccctgtccgatgcctgcatgggaacaatcgccagcttcctgagcaagtaccaggacatcatcatcgagcaccagaaggtggtcaagggcaaccagaagagactggaaagcctgagggagctggccggcaaagagaacctggaataccccagcgtgaccctgcctcctcagcctcacacaaaagaaggcgtggacgcctacaacgaagtgatcgccagagtgagaatgtgggtcaacctgaacctgtggcagaagctgaaactgtccagggacgacgccaagcctctgctgagactgaagggcttccctagcttccctctggtggaaagacaggccaatgaagtggattggtgggacatggtctgcaacgtgaagaagctgatcaacgagaagaaagaggatggcaaggttttctggcagaacctggccggctacaagagacaagaagccctgaggccttacctgagcagcgaagaggaccggaagaagggcaagaagttcgccagataccagttcggcgacctgctgctgcacctggaaaagaagcacggcgaggactggggcaaagtgtacgatgaggcctgggagagaatcgacaagaaggtggaaggcctgagcaagcacattaagctggaagaggaaagaaggagcgaggacgcccaatctaaagccgctctgaccgattggctgagagccaaggccagctttgtgatcgagggcctgaaagaggccgacaaggacgagttctgcagatgcgagctgaagctgcagaagtggtacggcgatctgagaggcaagcccttcgccattgaggccgagaacagcatcctggacatcagcggcttcagcaagcagtacaactgcgccttcatttggcagaaagacggcgtcaagaaactgaacctgtacctgatcatcaattacttcaaaggcggcaagctgcggttcaagaagatcaaacccgaggccttcgaggctaacagattctacaccgtgatcaacaaaaagtccggcgagatcgtgcccatggaagtgaacttcaacttcgacgaccccaacctgattatcctgcctctggccttcggcaagagacagggcagagagttcatctggaacgatctgctgagcctggaaaccggctctctgaagctggccaatggcagagtgatcgagaaaaccctgtacaacaggagaaccagacaggacgagcctgctctgtttgtggccctgaccttcgagagaagagaggtgctggacagcagcaacatcaagcccatgaacctgatcggcatcgaccggggcgagaatatccctgctgtgatcgccctgacagaccctgaaggatgcccactgagcagattcaaggactccctgggcaaccctacacacatcctgagaatcggcgagagctacaaagagaagcagaggacaatccaggccaagaaagaggtggaacagagaagagccggcggatactctaggaagtacgccagcaaggccaagaatctggccgacgacatggtccgaaacaccgccagagatctgctgtactacgccgtgacacaggacgccatgctgatcttcgagaatctgagcagaggcttcggccggcagggcaagagaacctttatggccgagaggcagtacaccagaatggaagattggctcacagctaaactggcctacgagggactgagcaagacctacctgtccaaaacactggcccagtatacctccaagacctgcagcaattgcggcttcaccatcaccagcgccgactacgacagagtgctggaaaagctcaagaaaaccgccaccggctggatgaccaccatcaacggcaaagagctgaaggttgagggccagatcacctactacaacaggtacaagaggcagaacgtcgtgaaggatctgagcgtggaactggacagactgagcgaagagagcgtgaacaacgacatcagcagctggacaaagggcagatcaggcgaggctctgagcctgctgaagaagaggtttagccacagacctgtgcaagagaagttcgtgtgcctgaactgcggcttcgagacacacgccgatgaacaggctgccctgaacattgccagaagctggctgttcctgagaagccaagagtacaagaagtaccagaccaacaagaccaccggcaacaccgacaagagggcctttgtggaaacctggcagagcttctacagaaaaaagctgaaagaagtctggaagcccgccgtg

SEQ ID NO: 77 - DNA, 2931 bp, synthetic construct
  misc_feature 1..2931: note = CasX variant
  source 1..2931: mol_type = other DNA
caagagatcaagagaatcaacaagatcagaaggagactggtcaaggacagcaacacaaagaaggccggcaagacaggccccatgaaaaccctgctcgtcagagtgatgacccctgacctgagagagcggctggaaaacctgagaaagaagcccgagaacatccctcagcctatcagcaacaccagcagggccaacctgaacaagctgctgaccgactacaccgagatgaagaaagccatcctgcacgtgtactgggaagagttccagaaagaccccgtgggcctgatgagcagagttgctcagcctgccagcaagaagatcgaccagaacaagctgaagcccgagatggacgagaagggcaatctgaccacagccggctttgcctgctctcagtgtggccagcctctgttcgtgtacaagctggaacaggtgtccgagaaaggcaaggcctacaccaactacttcggcagatgtaacgtggccgagcacgagaagctgattctgctggcccagctgaaacctgagaaggactctgatgaggccgtgacctacagcctgggcaagtttggacagagagccctggacttctacagcatccacgtgaccaaagaaagcacacaccccgtgaagcccctggctcagatcgccggcaatagatacgcctctggacctgtgggcaaagccctgtccgatgcctgcatgggaacaatcgccagcttcctgagcaagtaccaggacatcatcatcgagcaccagaaggtggtcaagggcaaccagaagagactggaaagcctgagggagctggccggcaaagagaacctggaataccccagcgtgaccctgcctcctcagcctcacacaaaagaaggcgtggacgcctacaacgaagtgatcgccagagtgagaatgtgggtcaacctgaacctgtggcagaagctgaaactgtccagggacgacgccaagcctctgctgagactgaagggcttccctagcttccctctggtggaaagacaggccaatgaagtggattggtgggacatggtctgcaacgtgaagaagctgatcaacgagaagaaagaggatggcaaggttttctggcagaacctggccggctacaagagacaagaagccctgaggccttacctgagcagcgaagaggaccggaagaagggcaagaagttcgccagataccagctgggcgacctgctgctgcacctggaaaagaagcacggcgaggactggggcaaagtgtacgatgaggcctgggagagaatcgacaagaaggtggaaggcctgagcaagcacattaagctggaagaggaaagaaggagcgaggacgcccaatctaaagccgctctgaccgattggctgagagccaaggccagctttgtgatcgagggcctgaaagaggccgacaaggacgagttctgcagatgcgagctgaagctgcagaagtggtacggcgatctgagaggcaagcccttcgccattgaggccgagaacagcatcctggacatcagcggcttcagcaagcagtacaactgcgccttcatttggcagaaagacggcgtcaagaaactgaacctgtacctgatcatcaattacttcaaaggcggcaagctgcggttcaagaagatcaaacccgaggccttcgaggctaacagattctacaccgtgatcaacaaaaagtccggcgagatcgtgcccatggaagtgaacttcaacttcgacgaccccaacctgattatcctgcctctggccttcggcaagagacagggcagagagttcatctggaacgatctgctgagcctggaaaccggctctctgaagctggccaatggcagagtgatcgagaaaaccctgtacaacaggagaaccagacaggacgagcctgctctgtttgtggccctgaccttcgagagaagagaggtgctggacagcagcaacatcaagcccatgaacctgatcggcgtggaccggggcgagaatatccctgctgtgatcgccctgacagaccctgaaggatgcccactgagcagattcaaggactccctgggcaaccctacacacatcctgagaatcggcgagagctacaaagagaagcagaggacaatccaggccaagaaagaggtggaacagagaagagccggcggatactctaggaagtacgccagcaaggccaagaatctggccgacgacatggtccgaaacaccgccagagatctgctgtactacgccgtgacacaggacgccatgctgatcttcgagaatctgagcagaggcttcggccggcagggcaagagaacctttatggccgagaggcagtacaccagaatggaagattggctcacagctaaactggcctacgagggactgagcaagacctacctgtccaaaacactggcccagtatacctccaagacctgcagcaattgcggcttcaccatcaccagcgccgactacgacagagtgctggaaaagctcaagaaaaccgccaccggctggatgaccaccatcaacggcaaagagctgaaggttgagggccagatcacctactacaacaggtacaagaggcagaacgtcgtgaaggatctgagcgtggaactggacagactgagcgaagagagcgtgaacaacgacatcagcagctggacaaagggcagatcaggcgaggctctgagcctgctgaagaagaggtttagccacagacctgtgcaagagaagttcgtgtgcctgaactgcggcttcgagacacacgccgatgaacaggctgccctgaacattgccagaagctggctgttcctgagaagccaagagtacaagaagtaccagaccaacaagaccaccggcaacaccgacaagagggcctttgtggaaacctggcagagcttctacagaaaaaagctgaaagaagtctggaagcccgccgtg

SEQ ID NO: 78 - DNA, 2934 bp, synthetic construct
  misc_feature 1..2934: note = CasX variant
  source 1..2934: mol_type = other DNA
caagagatcaagagaatcaacaagatcagaaggagactggtcaaggacagcaacacaaagaaggccggcaagacaggccccatgaaaaccctgctcgtcagagtgatgacccctgacctgagagagcggctggaaaacctgagaaagaagcccgagaacatccctcagcctatcagcaacaccagcagggccaacctgaacaagctgctgaccgactacaccgagatgaagaaagccatcctgcacgtgtactgggaagagttccagaaagaccccgtgggcctgatgagcagagttgctcagcctgccagcaagaagatcgaccagaacaagctgaagcccgagatggacgagaagggcaatctgaccacagccggctttgcctgctctcagtgtggccagcctctgttcgtgtacaagctggaacaggtgtccgagaaaggcaaggcctacaccaactacttcggcagatgtaacgtggccgagcacgagaagctgattctgctggcccagctgaaacctgagaaggactctgatgaggccgtgacctacagcctgggcaagtttggacagagagccctggacttctacagcatccacgtgaccaaagaaagcacacaccccgtgaagcccctggctcagatcgccggcaatagatacgcctctggacctgtgggcaaagccctgtccgatgcctgcatgggaacaatcgccagcttcctgagcaagtaccaggacatcatcatcgagcaccagaaggtggtcaagggcaaccagaagagactggaaagcctgagggagctggccggcaaagagaacctggaataccccagcgtgaccctgcctcctcagcctcacacaaaagaaggcgtggacgcctacaacgaagtgatcgccagagtgagaatgtgggtcaacctgaacctgtggcagaagctgaaactgtccagggacgacgccaagcctctgctgagactgaagggcttccctagcttccctctggtggaaagacaggccaatgaagtggattggtgggacatggtctgcaacgtgaagaagctgatcaacgagaagaaagaggatggcaaggttttctggcagaacctggccggctacaagagacaagaagccctgaggccttacctgagcagcgaagaggaccggaagaagggcaagaagttcgccagataccagctgggcgacctgctgctgcacctggaaaagaagcacggcgaggactggggcaaagtgtacgatgaggcctgggagagaatcgacaagaaggtggaaggcctgagcaagcacattaagctggaagaggaaagaaggagcgaggacgcccaatctaaagccgctctgaccgattggctgagagccaaggccagctttgtgatcgagggcctgaaagaggccgacaaggacgagttctgcagatgcgagctgaagctgcagaagtggtacggcgatctgagaggcaagcccttcgccattgaggccgagaacagcatcctggacatcagcggcttcagcaagcagtacaactgcgccttcatttggcagaaagacggcgtcaagaaactgaacctgtacctgatcatcaattacttcaaaggcggcaagctgcggttcaagaagatcaaacccgaggccttcgaggctaacagattctacaccgtgatcaacaaaaagtccggcgagatcgtgcccatggaagtgaacttcaacttcgacgaccccaacctgattatcctgcctctggccttcggcaagagacagggcagagagttcatctggaacgatctgctgagcctggaaaccggctctctgaagctggccaatggcagagtgatcgagaaaaccctgtacaacaggagaaccagacaggacgagcctgctctgtttgtggccctgaccttcgagagaagagaggtgctggacagcagcaacatcaagcccatgaacctgatcggcgtggaccggggcgagaatatccctgctgtgatcgccctgacagaccctgaaggatgcccactgagcagattcaaggactccctgggcaaccctacacacatcctgagaatcggcgagagctacaaagagaagcagaggacaatccaggccaagaaagaggtggaacagagaagagccggcggatactctaggaagtacgccagcaaggccaagaatctggccgacgacatggtccgaaacaccgccagagatctgctgtactacgccgtgacacaggacgccatgctgatcttcgagaatctgagcagaggcttcggccggcagggcaagagaacctttatggccgagaggcagtacaccagaatggaagattggctcacagctaaactggcctacgagggactgcccagcaagacctacctgtccaaaacactggcccagtatacctccaagacctgcagcaattgcggcttcaccatcaccagcgccgactacgacagagtgctggaaaagctcaagaaaaccgccaccggctggatgaccaccatcaacggcaaagagctgaaggttgagggccagatcacctactacaacaggtacaagaggcagaacgtcgtgaaggatctgagcgtggaactggacagactgagcgaagagagcgtgaacaacgacatcagcagctggacaaagggcagatcaggcgaggctctgagcctgctgaagaagaggtttagccacagacctgtgcaagagaagttcgtgtgcctgaactgcggcttcgagacacacgccgatgaacaggctgccctgaacattgccagaagctggctgttcctgagaagccaagagtacaagaagtaccagaccaacaagaccaccggcaacaccgacaagagggcctttgtggaaacctggcagagcttctacagaaaaaagctgaaagaagtctggaagcccgccgtg

SEQ ID NO: 79 - DNA, 2934 bp, synthetic construct
  misc_feature 1..2934: note = CasX variant
  source 1..2934: mol_type = other DNA
caagagatcaagagaatcaacaagatcagaaggagactggtcaaggacagcaacacaaagaaggccggcaagacacggggccccatgaaaaccctgctcgtcagagtgatgacccctgacctgagagagcggctggaaaacctgagaaagaagcccgagaacatccctcagcctatcagcaacaccagcagggccaacctgaacaagctgctgaccgactacaccgagatgaagaaagccatcctgcacgtgtactgggaagagttccagaaagaccccgtgggcctgatgagcagagttgctcagcctgccagcaagaagatcgaccagaacaagctgaagcccgagatggacgagaagggcaatctgaccacagccggctttgcctgctctcagtgtggccagcctctgttcgtgtacaagctggaacaggtgtccgagaaaggcaaggcctacaccaactacttcggcagatgtaacgtggccgagcacgagaagctgattctgctggcccagctgaaacctgagaaggactctgatgaggccgtgacctacagcctgggcaagtttggacagagagccctggacttctacagcatccacgtgaccaaagaaagcacacaccccgtgaagcccctggctcagatcgccggcaatagatacgcctctggacctgtgggcaaagccctgtccgatgcctgcatgggaacaatcgccagcttcctgagcaagtaccaggacatcatcatcgagcaccagaaggtggtcaagggcaaccagaagagactggaaagcctgagggagctggccggcaaagagaacctggaataccccagcgtgaccctgcctcctcagcctcacacaaaagaaggcgtggacgcctacaacgaagtgatcgccagagtgagaatgtgggtcaacctgaacctgtggcagaagctgaaactgtccagggacgacgccaagcctctgctgagactgaagggcttccctagcttccctctggtggaaagacaggccaatgaagtggattggtgggacatggtctgcaacgtgaagaagctgatcaacgagaagaaagaggatggcaaggttttctggcagaacctggccggctacaagagacaagaagccctgaggccttacctgagcagcgaagaggaccggaagaagggcaagaagttcgccagataccagctgggcgacctgctgctgcacctggaaaagaagcacggcgaggactggggcaaagtgtacgatgaggcctgggagagaatcgacaagaaggtggaaggcctgagcaagcacattaagctggaagaggaaagaaggagcgaggacgcccaatctaaagccgctctgaccgattggctgagagccaaggccagctttgtgatcgagggcctgaaagaggccgacaaggacgagttctgcagatgcgagctgaagctgcagaagtggtacggcgatctgagaggcaagcccttcgccattgaggccgagaacagcatcctggacatcagcggcttcagcaagcagtacaactgcgccttcatttggcagaaagacggcgtcaagaaactgaacctgtacctgatcatcaattacttcaaaggcggcaagctgcggttcaagaagatcaaacccgaggccttcgaggctaacagattctacaccgtgatcaacaaaaagtccggcgagatcgtgcccatggaagtgaacttcaacttcgacgaccccaacctgattatcctgcctctggccttcggcaagagacagggcagagagttcatctggaacgatctgctgagcctggaaaccggctctctgaagctggccaatggcagagtgatcgagaaaaccctgtacaacaggagaaccagacaggacgagcctgctctgtttgtggccctgaccttcgagagaagagaggtgctggacagcagcaacatcaagcccatgaacctgatcggcgtggaccggggcgagaatatccctgctgtgatcgccctgacagaccctgaaggatgcccactgagcagattcaaggactccctgggcaaccctacacacatcctgagaatcggcgagagctacaaagagaagcagaggacaatccaggccaagaaagaggtggaacagagaagagccggcggatactctaggaagtacgccagcaaggccaagaatctggccgacgacatggtccgaaacaccgccagagatctgctgtactacgccgtgacacaggacgccatgctgatcttcgagaatctgagcagaggcttcggccggcagggcaagagaacctttatggccgagaggcagtacaccagaatggaagattggctcacagctaaactggcctacgagggactgagcaagacctacctgtccaaaacactggcccagtatacctccaagacctgcagcaattgcggcttcaccatcaccagcgccgactacgacagagtgctggaaaagctcaagaaaaccgccaccggctggatgaccaccatcaacggcaaagagctgaaggttgagggccagatcacctactacaacaggtacaagaggcagaacgtcgtgaaggatctgagcgtggaactggacagactgagcgaagagagcgtgaacaacgacatcagcagctggacaaagggcagatcaggcgaggctctgagcctgctgaagaagaggtttagccacagacctgtgcaagagaagttcgtgtgcctgaactgcggcttcgagacacacgccgatgaacaggctgccctgaacattgccagaagctggctgttcctgagaagccaagagtacaagaagtaccagaccaacaagaccaccggcaacaccgacaagagggcctttgtggaaacctggcagagcttctacagaaaaaagctgaaagaagtctggaagcccgccgtg

SEQ ID NO: 80 - DNA, 2934 bp, synthetic construct
  misc_feature 1..2934: note = CasX variant
  source 1..2934: mol_type = other DNA
caagagatcaagagaatcaacaagatcagaaggagactggtcaaggacagcaacacaaagaaggccggcaagacaggccccatgaaaaccctgctcgtcagagtgatgacccctgacctgagagagcggctggaaaacctgagaaagaagcccgagaacatccctcagcctatcagcaacaccagcagggccaacctgaacaagctgctgaccgactacaccgagatgaagaaagccatcctgcacgtgtactgggaagagttccagaaagaccccgtgggcctgatgagcagagttgctcagcctgccagcaagaagatcgaccagaacaagctgaagcccgagatggacgagaagggcaatctgaccacagccggctttgcctgctctcagtgtggccagcctctgttcgtgtacaagctggaacaggtgtccgagaaaggcaaggcctacaccaactacttcggcagatgtaacgtggccgagcacgagaagctgattctgctggcccagctgaaacctgagaaggactctgatgaggccgtgacctacagcctgggcaagtttggacagagagccctggacttctacagcatccacgtgaccaaagaaagcacacaccccgtgaagcccctggctcagatcgccggcaatagatacgcctcttcccctgtgggcaaagccctgtccgatgcctgcatgggaacaatcgccagcttcctgagcaagtaccaggacatcatcatcgagcaccagaaggtggtcaagggcaaccagaagagactggaaagcctgagggagctggccggcaaagagaacctggaataccccagcgtgaccctgcctcctcagcctcacacaaaagaaggcgtggacgcctacaacgaagtgatcgccagagtgagaatgtgggtcaacctgaacctgtggcagaagctgaaactgtccagggacgacgccaagcctctgctgagactgaagggcttccctagcttccctctggtggaaagacaggccaatgaagtggattggtgggacatggtctgcaacgtgaagaagctgatcaacgagaagaaagaggatggcaaggttttctggcagaacctggccggctacaagagacaagaagccctgaggccttacctgagcagcgaagaggaccggaagaagggcaagaagttcgccagataccagctgggcgacctgctgctgcacctggaaaagaagcacggcgaggactggggcaaagtgtacgatgaggcctgggagagaatcgacaagaaggtggaaggcctgagcaagcacattaagctggaagaggaaagaaggagcgaggacgcccaatctaaagccgctctgaccgattggctgagagccaaggccagctttgtgatcgagggcctgaaagaggccgacaaggacgagttctgcagatgcgagctgaagctgcagaagtggtacggcgatctgagaggcaagcccttcgccattgaggccgagaacagcatcctggacatcagcggcttcagcaagcagtacaactgcgccttcatttggcagaaagacggcgtcaagaaactgaacctgtacctgatcatcaattacttcaaaggcggcaagctgcggttcaagaagatcaaacccgaggccttcgaggctaacagattctacaccgtgatcaacaaaaagtccggcgagatcgtgcccatggaagtgaacttcaacttcgacgaccccaacctgattatcctgcctctggccttcggcaagagacagggcagagagttcatctggaacgatctgctgagcctggaaaccggctctctgaagctggccaatggcagagtgatcgagaaaaccctgtacaacaggagaaccagacaggacgagcctgctctgtttgtggccctgaccttcgagagaagagaggtgctggacagcagcaacatcaagcccatgaacctgatcggcgtggaccggggcgagaatatccctgctgtgatcgccctgacagaccctgaaggatgcccactgagcagattcaaggactccctgggcaaccctacacacatcctgagaatcggcgagagctacaaagagaagcagaggacaatccaggccaagaaagaggtggaacagagaagagccggcggatactctaggaagtacgccagcaaggccaagaatctggccgacgacatggtccgaaacaccgccagagatctgctgtactacgccgtgacacaggacgccatgctgatcttcgagaatctgagcagaggcttcggccggcagggcaagagaacctttatggccgagaggcagtacaccagaatggaagattggctcacagctaaactggcctacgagggactgcccagcaagacctacctgtccaaaacactggcccagtatacctccaagacctgcagcaattgcggcttcaccatcaccagcgccgactacgacagagtgctggaaaagctcaagaaaaccgccaccggctggatgaccaccatcaacggcaaagagctgaaggttgagggccagatcacctactacaacaggtacaagaggcagaacgtcgtgaaggatctgagcgtggaactggacagactgagcgaagagagcgtgaacaacgacatcagcagctggacaaagggcagatcaggcgaggctctgagcctgctgaagaagaggtttagccacagacctgtgcaagagaagttcgtgtgcctgaactgcggcttcgagacacacgccgatgaacaggctgccctgaacattgccagaagctggctgttcctgagaagccaagagtacaagaagtaccagaccaacaagaccaccggcaacaccgacaagagggcctttgtggaaacctggcagagcttctacagaaaaaagctgaaagaagtctggaagcccgccgtg

SEQ ID NO: 81 - DNA, 2934 bp, synthetic construct
  misc_feature 1..2934: note = CasX variant
  source 1..2934: mol_type = other DNA
caagagatcaagagaatcaacaagatcagaaggagactggtcaaggacagcaacacaaagaaggccggcaagacaggccccatgaaaaccctgctcgtcagagtgatgacccctgacctgagagagcggctggaaaacctgagaaagaagcccgagaacatccctcagcctatcagcaacaccagcagggccaacctgaacaagctgctgaccgactacaccgagatgaagaaagccatcctgcacgtgtactgggaagagttccagaaagaccccgtgggcctgatgagcagagttgctcagcctgccagcaagaagatcgaccagaacaagctgaagcccgagatggacgagaagggcaatctgaccacagccggctttgcctgctctcagtgtggccagcctctgttcgtgtacaagctggaacaggtgtccgagaaaggcaaggcctacaccaactacttcggcagatgtaacgtggccgagcacgagaagctgattctgctggcccagctgaaacctgagaaggactctgatgaggccgtgacctacagcctgggcaagtttggacagagagccctggacttctacagcatccacgtgaccaaagaaagcacacaccccgtgaagcccctggctcagatcgccggcaatagatacgcctctacccctgtgggcaaagccctgtccgatgcctgcatgggaacaatcgccagcttcctgagcaagtaccaggacatcatcatcgagcaccagaaggtggtcaagggcaaccagaagagactggaaagcctgagggagctggccggcaaagagaacctggaataccccagcgtgaccctgcctcctcagcctcacacaaaagaaggcgtggacgcctacaacgaagtgatcgccagagtgagaatgtgggtcaacctgaacctgtggcagaagctgaaactgtccagggacgacgccaagcctctgctgagactgaagggcttccctagcttccctctggtggaaagacaggccaatgaagtggattggtgggacatggtctgcaacgtgaagaagctgatcaacgagaagaaagaggatggcaaggttttctggcagaacctggccggctacaagagacaagaagccctgaggccttacctgagcagcgaagaggaccggaagaagggcaagaagttcgccagataccagctgggcgacctgctgctgcacctggaaaagaagcacggcgaggactggggcaaagtgtacgatgaggcctgggagagaatcgacaagaaggtggaaggcctgagcaagcacattaagctggaagaggaaagaaggagcgaggacgcccaatctaaagccgctctgaccgattggctgagagccaaggccagctttgtgatcgagggcctgaaagaggccgacaaggacgagttctgcagatgcgagctgaagctgcagaagtggtacggcgatctgagaggcaagcccttcgccattgaggccgagaacagcatcctggacatcagcggcttcagcaagcagtacaactgcgccttcatttggcagaaagacggcgtcaagaaactgaacctgtacctgatcatcaattacttcaaaggcggcaagctgcggttcaagaagatcaaacccgaggccttcgaggctaacagattctacaccgtgatcaacaaaaagtccggcgagatcgtgcccatggaagtgaacttcaacttcgacgaccccaacctgattatcctgcctctggccttcggcaagagacagggcagagagttcatctggaacgatctgctgagcctggaaaccggctctctgaagctggccaatggcagagtgatcgagaaaaccctgtacaacaggagaaccagacaggacgagcctgctctgtttgtggccctgaccttcgagagaagagaggtgctggacagcagcaacatcaagcccatgaacctgatcggcgtggaccggggcgagaatatccctgctgtgatcgccctgacagaccctgaaggatgcccactgagcagattcaaggactccctgggcaaccctacacacatcctgagaatcggcgagagctacaaagagaagcagaggacaatccaggccaagaaagaggtggaacagagaagagccggcggatactctaggaagtacgccagcaaggccaagaatctggccgacgacatggtccgaaacaccgccagagatctgctgtactacgccgtgacacaggacgccatgctgatcttcgagaatctgagcagaggcttcggccggcagggcaagagaacctttatggccgagaggcagtacaccagaatggaagattggctcacagctaaactggcctacgagggactgcccagcaagacctacctgtccaaaacactggcccagtatacctccaagacctgcagcaattgcggcttcaccatcaccagcgccgactacgacagagtgctggaaaagctcaagaaaaccgccaccggctggatgaccaccatcaacggcaaagagctgaaggttgagggccagatcacctactacaacaggtacaagaggcagaacgtcgtgaaggatctgagcgtggaactggacagactgagcgaagagagcgtgaacaacgacatcagcagctggacaaagggcagatcaggcgaggctctgagcctgctgaagaagaggtttagccacagacctgtgcaagagaagttcgtgtgcctgaactgcggcttcgagacacacgccgatgaacaggctgccctgaacattgccagaagctggctgttcctgagaagccaagagtacaagaagtaccagaccaacaagaccaccggcaacaccgacaagagggcctttgtggaaacctggcagagcttctacagaaaaaagctgaaagaagtctggaagcccgccgtg

SEQ ID NO: 82 - DNA, 2934 bp, synthetic construct
  misc_feature 1..2934: note = CasX variant
  source 1..2934: mol_type = other DNA
caagagatcaagagaatcaacaagatcagaaggagactggtcaaggacagcaacacaaagaaggccggcaagacaggccccatgaaaaccctgctcgtcagagtgatgacccctgacctgagagagcggctggaaaacctgagaaagaagcccgagaacatccctcagcctatcagcaacaccagcagggccaacctgaacaagctgctgaccgactacaccgagatgaagaaagccatcctgcacgtgtactgggaagagttccagaaagaccccgtgggcctgatgagcagagttgctcagcctgccagcaagaagatcgaccagaacaagctgaagcccgagatggacgagaagggcaatctgaccacagccggctttgcctgctctcagtgtggccagcctctgttcgtgtacaagctggaacaggtgtccgagaaaggcaaggcctacaccaactacttcggcagatgtaacgtggccgagcacgagaagctgattctgctggcccagctgaaacctgagaaggactctgatgaggccgtgacctacagcctgggcaagtttggacagagagccctggacttctacagcatccacgtgaccaaagaaagcacacaccccgtgaagcccctggctcagatcgccggcaatagatacgcctctgcccctgtgggcaaagccctgtccgatgcctgcatgggaacaatcgccagcttcctgagcaagtaccaggacatcatcatcgagcaccagaaggtggtcaagggcaaccagaagagactggaaagcctgagggagctggccggcaaagagaacctggaataccccagcgtgaccctgcctcctcagcctcacacaaaagaaggcgtggacgcctacaacgaagtgatcgccagagtgagaatgtgggtcaacctgaacctgtggcagaagctgaaactgtccagggacgacgccaagcctctgctgagactgaagggcttccctagcttccctctggtggaaagacaggccaatgaagtggattggtgggacatggtctgcaacgtgaagaagctgatcaacgagaagaaagaggatggcaaggttttctggcagaacctggccggctacaagagacaagaagccctgaggccttacctgagcagcgaagaggaccggaagaagggcaagaagttcgccagataccagctgggcgacctgctgctgcacctggaaaagaagcacggcgaggactggggcaaagtgtacgatgaggcctgggagagaatcgacaagaaggtggaaggcctgagcaagcacattaagctggaagaggaaagaaggagcgaggacgcccaatctaaagccgctctgaccgattggctgagagccaaggccagctttgtgatcgagggcctgaaagaggccgacaaggacgagttctgcagatgcgagctgaagctgcagaagtggtacggcgatctgagaggcaagcccttcgccattgaggccgagaacagcatcctggacatcagcggcttcagcaagcagtacaactgcgccttcatttggcagaaagacggcgtcaagaaactgaacctgtacctgatcatcaattacttcaaaggcggcaagctgcggttcaagaagatcaaacccgaggccttcgaggctaacagattctacaccgtgatcaacaaaaagtccggcgagatcgtgcccatggaagtgaacttcaacttcgacgaccccaacctgattatcctgcctctggccttcggcaagagacagggcagagagttcatctggaacgatctgctgagcctggaaaccggctctctgaagctggccaatggcagagtgatcgagaaaaccctgtacaacaggagaaccagacaggacgagcctgctctgtttgtggccctgaccttcgagagaagagaggtgctggacagcagcaacatcaagcccatgaacctgatcggcgtggaccggggcgagaatatccctgctgtgatcgccctgacagaccctgaaggatgcccactgagcagattcaaggactccctgggcaaccctacacacatcctgagaatcggcgagagctacaaagagaagcagaggacaatccaggccaagaaagaggtggaacagagaagagccggcggatactctaggaagtacgccagcaaggccaagaatctggccgacgacatggtccgaaacaccgccagagatctgctgtactacgccgtgacacaggacgccatgctgatcttcgagaatctgagcagaggcttcggccggcagggcaagagaacctttatggccgagaggcagtacaccagaatggaagattggctcacagctaaactggcctacgagggactgcccagcaagacctacctgtccaaaacactggcccagtatacctccaagacctgcagcaattgcggcttcaccatcaccagcgccgactacgacagagtgctggaaaagctcaagaaaaccgccaccggctggatgaccaccatcaacggcaaagagctgaaggttgagggccagatcacctactacaacaggtacaagaggcagaacgtcgtgaaggatctgagcgtggaactggacagactgagcgaagagagcgtgaacaacgacatcagcagctggacaaagggcagatcaggcgaggctctgagcctgctgaagaagaggtttagccacagacctgtgcaagagaagttcgtgtgcctgaactgcggcttcgagacacacgccgatgaacaggctgccctgaacattgccagaagctggctgttcctgagaagccaagagtacaagaagtaccagaccaacaagaccaccggcaacaccgacaagagggcctttgtggaaacctggcagagcttctacagaaaaaagctgaaagaagtctggaagcccgccgtg

SEQ ID NO: 83 - DNA, 2934 bp, synthetic construct
  misc_feature 1..2934: note = CasX variant
  source 1..2934: mol_type = other DNA
caagagatcaagagaatcaacaagatcagaaggagactggtcaaggacagcaacacaaagaaggccggcaagacaggccccatgaaaaccctgctcgtcagagtgatgacccctgacctgagagagcggctggaaaacctgagaaagaagcccgagaacatccctcagcctatcagcaacaccagcagggccaacctgaacaagctgctgaccgactacaccgagatgaagaaagccatcctgcacgtgtactgggaagagttccagaaagaccccgtgggcctgatgagcagagttgctcagcctgccagcaagaagatcgaccagaacaagctgaagcccgagatggacgagaagggcaatctgaccacagccggctttgcctgctctcagtgtggccagcctctgttcgtgtacaagctggaacaggtgtccgagaaaggcaaggcctacaccaactacttcggcagatgtaacgtggccgagcacgagaagctgattaagctggcccagctgaaacctgagaaggactctgatgaggccgtgacctacagcctgggcaagtttggacagagagccctggacttctacagcatccacgtgaccaaagaaagcacacaccccgtgaagcccctggctcagatcgccggcaatagatacgcctctggacctgtgggcaaagccctgtccgatgcctgcatgggaacaatcgccagcttcctgagcaagtaccaggacatcatcatcgagcaccagaaggtggtcaagggcaaccagaagagactggaaagcctgagggagctggccggcaaagagaacctggaataccccagcgtgaccctgcctcctcagcctcacacaaaagaaggcgtggacgcctacaacgaagtgatcgccagagtgagaatgtgggtcaacctgaacctgtggcagaagctgaaactgtccagggacgacgccaagcctctgctgagactgaagggcttccctagcttccctctggtggaaagacaggccaatgaagtggattggtgggacatggtctgcaacgtgaagaagctgatcaacgagaagaaagaggatggcaaggttttctggcagaacctggccggctacaagagacaagaagccctgaggccttacctgagcagcgaagaggaccggaagaagggcaagaagttcgccagataccagctgggcgacctgctgctgcacctggaaaagaagcacggcgaggactggggcaaagtgtacgatgaggcctgggagagaatcgacaagaaggtggaaggcctgagcaagcacattaagctggaagaggaaagaaggagcgaggacgcccaatctaaagccgctctgaccgattggctgagagccaaggccagctttgtgatcgagggcctgaaagaggccgacaaggacgagttctgcagatgcgagctgaagctgcagaagtggtacggcgatctgagaggcaagcccttcgccattgaggccgagaacagcatcctggacatcagcggcttcagcaagcagtacaactgcgccttcatttggcagaaagacggcgtcaagaaactgaacctgtacctgatcatcaattacttcaaaggcggcaagctgcggttcaagaagatcaaacccgaggccttcgaggctaacagattctacaccgtgatcaacaaaaagtccggcgagatcgtgcccatggaagtgaacttcaacttcgacgaccccaacctgattatcctgcctctggccttcggcaagagacagggcagagagttcatctggaacgatctgctgagcctggaaaccggctctctgaagctggccaatggcagagtgatcgagaaaaccctgtacaacaggagaaccagacaggacgagcctgctctgtttgtggccctgaccttcgagagaagagaggtgctggacagcagcaacatcaagcccatgaacctgatcggcgtggaccggggcgagaatatccctgctgtgatcgccctgacagaccctgaaggatgcccactgagcagattcaaggactccctgggcaaccctacacacatcctgagaatcggcgagagctacaaagagaagcagaggacaatccaggccaagaaagaggtggaacagagaagagccggcggatactctaggaagtacgccagcaaggccaagaatctggccgacgacatggtccgaaacaccgccagagatctgctgtactacgccgtgacacaggacgccatgctgatcttcgagaatctgagcagaggcttcggccggcagggcaagagaacctttatggccgagaggcagtacaccagaatggaagattggctcacagctaaactggcctacgagggactgcccagcaagacctacctgtccaaaacactggcccagtatacctccaagacctgcagcaattgcggcttcaccatcaccagcgccgactacgacagagtgctggaaaagctcaagaaaaccgccaccggctggatgaccaccatcaacggcaaagagctgaaggttgagggccagatcacctactacaacaggtacaagaggcagaacgtcgtgaaggatctgagcgtggaactggacagactgagcgaagagagcgtgaacaacgacatcagcagctggacaaagggcagatcaggcgaggctctgagcctgctgaagaagaggtttagccacagacctgtgcaagagaagttcgtgtgcctgaactgcggcttcgagacacacgccgatgaacaggctgccctgaacattgccagaagctggctgttcctgagaagccaagagtacaagaagtaccagaccaacaagaccaccggcaacaccgacaagagggcctttgtggaaacctggcagagcttctacagaaaaaagctgaaagaagtctggaagcccgccgtg

SEQ ID NO: 84 - DNA, 2931 bp, synthetic construct
  misc_feature 1..2931: note = CasX variant
  source 1..2931: mol_type = other DNA
caagagatcaagagaatcaacaagatcagaaggagactggtcaaggacagcaacacaaagaaggccggcaagacaggccccatgaaaaccctgctcgtcagagtgatgacccctgacctgagagagcggctggaaaacctgagaaagaagcccgagaacatccctcagcctatcagcaacaccagcagggccaacctgaacaagctgctgaccgactacaccgagatgaagaaagccatcctgcacgtgtactgggaagagttccagaaagaccccgtgggcctgatgagcagagttgctcagcctgccagcaagaagatcgaccagaacaagctgaagcccgagatggacgagaagggcaatctgaccacagccggctttgcctgctctcagtgtggccagcctctgttcgtgtacaagctggaacaggtgtccgagaaaggcaaggcctacaccaactacttcggcagatgtaacgtggccgagcacgagaagctgattctgctggcccagctgaaacctgagaaggactctgatgaggccgtgacctacagcctgggcaagtttggacagagagccctggacttctacagcatccacgtgaccaaagaaagcacacaccccgtgaagcccctggctcagatcgccggcaatagatacgcctctggacctgtgggcaaagccctgtccgatgcctgcatgggaacaatcgccagcttcctgagcaagtaccaggacatcatcatcgagcaccagaaggtggtcaagggcaaccagaagagactggaaagcctgagggagctggccggcaaagagaacctggaataccccagcgtgaccctgcctcctcagcctcacacaaaagaaggcgtggacgcctacaacgaagtgatcgccagagtgagaatgtgggtcaacctgaacctgtggcagaagctgaaactgtccagggacgacgccaagcctctgctgagactgaagggcttccctagcttccctctggtggaaagacaggccaatgaagtggattggtgggacatggtctgcaacgtgaagaagctgatcaacgagaagaaagaggatggcaaggttttctggcagaacctggccggctacaagagacaagaagccctgaggccttacctgagcagccccgaggaccggaagaagggcaagaagttcgccagataccagttcggcgacctgctgctgcacctggaaaagaagcacggcgaggactggggcaaagtgtacgatgaggcctgggagagaatcgacaagaaggtggaaggcctgagcaagcacattaagctggaagaggaaagaaggagcgaggacgcccaatctaaagccgctctgaccgattggctgagagccaaggccagctttgtgatcgagggcctgaaagaggccgacaaggacgagttctgcagatgcgagctgaagctgcagaagtggtacggcgatctgagaggcaagcccttcgccattgaggccgagaacagcatcctggacatcagcggcttcagcaagcagtacaactgcgccttcatttggcagaaagacggcgtcaagaaactgaacctgtacctgatcatcaattacttcaaaggcggcaagctgcggttcaagaagatcaaacccgaggccttcgaggctaacagattctacaccgtgatcaacaaaaagtccggcgagatcgtgcccatggaagtgaacttcaacttcgacgaccccaacctgattatcctgcctctggccttcggcaagagacagggcagagagttcatctggaacgatctgctgagcctggaaaccggctctctgaagctggccaatggcagagtgatcgagaaaaccctgtacaacaggagaaccagacaggacgagcctgctctgtttgtggccctgaccttcgagagaagagaggtgctggacagcagcaacatcaagcccatgaacctgatcggcgtggaccggggcgagaatatccctgctgtgatcgccctgacagaccctgaaggatgcccactgagcagattcaaggactccctgggcaaccctacacacatcctgagaatcggcgagagctacaaagagaagcagaggacaatccaggccaagaaagaggtggaacagagaagagccggcggatactctaggaagtacgccagcaaggccaagaatctggccaacgacatggtccgaaacaccgccagagatctgctgtactacgccgtgacacaggacgccatgctgatcttcgagaatctgagcagaggcttcggccggcagggcaagagaacctttatggccgagaggcagtacaccagaatggaagattggctcacagctaaactggcctacgagggactgagcaagacctacctgtccaaaacactggcccagtatacctccaagacctgcagcaattgcggcttcaccatcaccagcgccgactacgacagagtgctggaaaagctcaagaaaaccgccaccggctggatgaccaccatcaacggcaaagagctgaaggttgagggccagatcacctactacaacaggaggaagaggcagaacgtcgtgaaggatctgagcgtggaactggacagactgagcgaagagagcgtgaacaacgacatcagcagctggacaaagggcagatcaggcgaggctctgagcctgctgaagaagaggtttagccacagacctgtgcaagagaagttcgtgtgcctgaactgcggcttcgagacacacgccgatgaacaggctgccctgaacattgccagaagctggctgttcctgagaagccaagagtacaagaagtaccagaccaacaagaccaccggcaacaccgacaagagggcctttgtggaaacctggcagagcttctacagaaaaaagctgaaagaagtctggaagcccgccgtg

SEQ ID NO: 85 - DNA, 2931 bp, synthetic construct
  misc_feature 1..2931: note = CasX variant
  source 1..2931: mol_type = other DNA
caagagatcaagagaatcaacaagatcagaaggagactggtcaaggacagcaacacaaagaaggccggcaagacaggccccatgaaaaccctgctcgtcagagtgatgacccctgacctgagagagcggctggaaaacctgagaaagaagcccgagaacatccctcagcctatcagcaacaccagcagggccaacctgaacaagctgctgaccgactacaccgagatgaagaaagccatcctgcacgtgtactgggaagagttccagaaagaccccgtgggcctgatgagcagagttgctcagcctgccagcaagaagatcgaccagaacaagctgaagcccgagatggacgagaagggcaatctgaccacagccggctttgcctgctctcagtgtggccagcctctgttcgtgtacaagctggaacaggtgtccgagaaaggcaaggcctacaccaactacttcggcagatgtaacgtggccgagcacgagaagctgattctgctggcccagctgaaacctgagaaggactctgatgaggccgtgacctacagcctgggcaagtttggacagagagccctggacttctacagcatccacgtgaccaaagaaagcacacaccccgtgaagcccctggctcagatcgccggcaatagatacgcctctggacctgtgggcaaagccctgtccgatgcctgcatgggaacaatcgccagcttcctgagcaagtaccaggacatcatcatcgagcaccagaaggtggtcaagggcaaccagaagagactggaaagcctgagggagctggccggcaaagagaacctggaataccccagcgtgaccctgcctcctcagcctcacacaaaagaaggcgtggacgcctacaacgaagtgatcgccagagtgagaatgtgggtcaacctgaacctgtggcagaagctgaaactgtccagggacgacgccaagcctctgctgagactgaagggcttccctagcttccctctggtggaaagacaggccaatgaagtggattggtgggacatggtctgcaacgtgaagaagctgatcaacgagaagaaagaggatggcaaggttttctggcagaacctggccggctacaagagacaagaagccctgaggccttacctgagcagcgaagaggaccggaagaagggcaagaagttcgccagataccagctgggcgacctgctgctgcacctggaaaagaagcacggcgaggactggggcaaagtgtacgatgaggcctgggagagaatcgacaagaaggtggaaggcctgagcaagcacattaagctggaagaggaaagaaggagcgaggacgcccaatctaaagccgctctgaccgattggctgagagccaaggccagctttgtgatcgagggcctgaaagaggccgacaaggacgagttcagcagatgcgagctgaagctgcagaagtggtacggcgatctgagaggcaagcccttcgccattgaggccgagaacagcatcctggacatcagcggcttcagcaagcagtacaactgcgccttcatttggcagaaagacggcgtcaagaaactgaacctgtacctgatcatcaattacttcaaaggcggcaagctgcggttcaagaagatcaaacccgaggccttcgaggctaacagattctacaccgtgatcaacaaaaagtccggcgagatcgtgcccatggaagtgaacttcaacttcgacgaccccaacctgattatcctgcctctggccttcggcaagagacagggcagagagttcatctggaacgatctgctgagcctggaaaccggctctctgaagctggccaatggcagagtgatcgagaaaaccctgtacaacaggagaaccagacaggacgagcctgctctgtttgtggccctgaccttcgagagaagagaggtgctggacagcagcaacatcaagcccatgaacctgatcggcgtggaccggggcgagaatatccctgctgtgatcgccctgacagaccctgaaggatgcccactgagcagattcaaggactccctgggcaaccctacacacatcctgagaatcggcgagagctacaaagagaagcagaggacaatccaggccaagaaagaggtggaacagagaagagccggcggatactctaggaagtacgccagcaaggccaagaatctggccgacgacatggtccgaaacaccgccagagatctgctgtactacgccgtgacacaggacgccatgctgatcttcgagaatctgagcagaggcttcggccggcagggcaagagaacctttatggccgagaggcagtacaccagaatggaagattggctcacagctaaactggcctacgagggactgagcaagacctacctgtccaaaacactggcccagtatacctccaagacctgcagcaattgcggcttcaccatcaccagcgccgactacgacagagtgctggaaaagctcaagaaaaccgccaccggctggatgaccaccatcaacggcaaagagctgaaggttgagggccagatcacctactacaacaggaggaagaggcagaacgtcgtgaaggatctgagcgtggaactggacagactgagcgaagagagcgtgaacaacgacatcagcagctggacaaagggcagatcaggcgaggctctgagcctgctgaagaagaggtttagccacagacctgtgcaagagaagttcgtgtgcctgaactgcggcttcgagacacacgccgatgaacaggctgccctgaacattgccagaagctggctgttcctgagaagccaagagtacaagaagtaccagaccaacaagaccaccggcaacaccgacaagagggcctttgtggaaacctggcagagcttctacagaaaaaagctgaaagaagtctggaagcccgccgtg

SEQ ID NO: 86 - DNA, 2931 bp, synthetic construct
  misc_feature 1..2931: note = CasX variant
  source 1..2931: mol_type = other DNA
caagagatcaagagaatcaacaagatcagaaggagactggtcaaggacagcaacacaaagaaggccggcaagacaggccccatgaaaaccctgctcgtcagagtgatgacccctgacctgagagagcggctggaaaacctgagaaagaagcccgagaacatccctcagcctatcagcaacaccagcagggccaacctgaacaagctgctgaccgactacaccgagatgaagaaagccatcctgcacgtgtactgggaagagttccagaaagaccccgtgggcctgatgagcagagttgctcagcctgccagcaagaagatcgaccagaacaagctgaagcccgagatggacgagaagggcaatctgaccacagccggctttgcctgctctcagtgtggccagcctctgttcgtgtacaagctggaacaggtgtccgagaaaggcaaggcctacaccaactacttcggcagatgtaacgtggccgagcacgagaagctgattctgctggcccagctgaaacctgagaaggactctgatgaggccgtgacctacagcctgggcaagtttggacagagagccctggacttctacagcatccacgtgaccaaagaaagcacacaccccgtgaagcccctggctcagatcgccggcaatagatacgcctctggacctgtgggcaaagccctgtccgatgcctgcatgggaacaatcgccagcttcctgagcaagtaccaggacatcatcatcgagcaccagaaggtggtcaagggcaaccagaagagactggaaagcctgagggagctggccggcaaagagaacctggaataccccagcgtgaccctgcctcctcagcctcacacaaaagaaggcgtggacgcctacaacgaagtgatcgccagagtgagaatgtgggtcaacctgaacctgtggcagaagctgaaactgtccagggacgacgccaagcctctgctgagactgaagggcttccctagcttccctctggtggaaagacaggccaatgaagtggattggtgggacatggtctgcaacgtgaagaagctgatcaacgagaagaaagaggatggcaaggttttctggcagaacctggccggctacaagagacaagaagccctgaggccttacctgagcagcgaaaacgaccggaagaagggcaagaagttcgccagataccagttcggcgacctgctgaagcacctggaaaagaagcacggcgaggactggggcaaagtgtacgatgaggcctgggagagaatcgacaagaaggtggaaggcctgagcaagcacattaagctggaagaggaaagaaggagcgaggacgcccaatctaaagccgctctgaccgattggctgagagccaaggccagctttgtgatcgagggcctgaaagaggccgacaaggacgagttcagcagatgcgagctgaagctgcagaagtggtacggcgatctgagaggcaagcccttcgccattgaggccgagaacagcatcctggacatcagcggcttcagcaagcagtacaactgcgccttcatttggcagaaagacggcgtcaagaaactgaacctgtacctgatcatcaattacttcaaaggcggcaagctgcggttcaagaagatcaaacccgaggccttcgaggctaacagattctacaccgtgatcaacaaaaagtccggcgagatcgtgcccatggaagtgaacttcaacttcgacgaccccaacctgattatcctgcctctggccttcggcaagagacagggcagagagttcatctggaacgatctgctgagcctggaaaccggctctctgaagctggccaatggcagagtgatcgagaaaaccctgtacaacaggagaaccagacaggacgagcctgctctgtttgtggccctgaccttcgagagaagagaggtgctggacagcagcaacatcaagcccatgaacctgatcggcgtggaccggggcgagaatatccctgctgtgatcgccctgacagaccctgaaggatgcccactgagcagattcaaggactccctgggcaaccctacacacatcctgagaatcggcgagagctacaaagagaagcagaggacaatccaggccaagaaagaggtggaacagagaagagccggcggatactctaggaagtacgccagcaaggccaagaatctggccgacgacatggtccgaaacaccgccagagatctgctgtactacgccgtgacacaggacgccatgctgatcttcgagaatctgagcagaggcttcggccggcagggcaagagaacctttatggccgagaggcagtacaccagaatggaagattggctcacagctaaactggcctacgagggactgagcaagaccctgctgtccaaaacactggcccagtatacctccaagacctgcagcaattgcggcttcaccatcaccagcgccgactacgacagagtgctggaaaagctcaagaaaaccgccaccggctggatgaccaccatcaacggcaaagagctgaaggttgagggccagatcacctactacaacaggaggaagaggcagaacgtcgtgaaggatctgagcgtggaactggacagactgagcgaagagagcgtgaacaacgacatcagcagctggacaaagggcagatcaggcgaggctctgagcctgctgaagaagaggtttagccacagacctgtgcaagagaagttcgtgtgcctgaactgcggcttcgagacacacgccgatgaacaggctgccctgaacattgccagaagctggctgttcctgagaagccaagagtacaagaagtaccagaccaacaagaccaccggcaacaccgacaagagggcctttgtggaaacctggcagagcttctacagaaaaaagctgaaagaagtctggaagcccgccgtg

SEQ ID NO: 87 - DNA, 2931 bp, synthetic construct
  misc_feature 1..2931: note = CasX variant
  source 1..2931: mol_type = other DNA
caagagatcaagagaatcaacaagatcagaaggagactggtcaaggacagcaacacaaagaaggccggcaagacaggccccatgaaaaccctgctcgtcagagtgatgacccctgacctgagagagcggctggaaaacctgagaaagaagcccgagaacatccctcagcctatcagcaacaccagcagggccaacctgaacaagctgctgaccgactacaccgagatgaagaaagccatcctgcacgtgtactgggaagagttccagaaagaccccgtgggcctgatgagcagagttgctcagcctgccagcaagaagatcgaccagaacaagctgaagcccgagatggacgagaagggcaatctgaccacagccggctttgcctgctctcagtgtggccagcctctgttcgtgtacaagctggaacaggtgtccgagaaaggcaaggcctacaccaactacttcggcagatgtaacgtggccgagcacgagaagctgattctgctggcccagctgaaacctgagaaggactctgatgaggccgtgacctacagcctgggcaagtttggacagagagccctggacttctacagcatccacgtgaccaaagaaagcacacaccccgtgaagcccctggctcagatcgccggcaatagatacgcctctggacctgtgggcaaagccctgtccgatgcctgcatgggaacaatcgccagcttcctgagcaagtaccaggacatcatcatcgagcaccagaaggtggtcaagggcaaccagaagagactggaaagcctgagggagctggccggcaaagagaacctggaataccccagcgtgaccctgcctcctcagcctcacacaaaagaaggcgtggacgcctacaacgaagtgatcgccagagtgagaatgtgggtcaacctgaacctgtggcagaagctgaaactgtccagggacgacgccaagcctctgctgagactgaagggcttccctagcttccctctggtggaaagacaggccaatgaagtggattggtgggacatggtctgcaacgtgaagaagctgatcaacgagaagaaagaggatggcaaggttttctggcagaacctggccggctacaagagacaagaagccctgaggccttacctgagcagccccgaggaccggaagaagggcaagaagttcgccagataccagctgggcgacctgctgctgcacctggaaaagaagcacggcgaggactggggcaaagtgtacgatgaggcctgggagagaatcgacaagaaggtggaaggcctgagcaagcacattaagctggaagaggaaagaaggagcgaggacgcccaatctaaagccgctctgaccgattggctgagagccaaggccagctttgtgatcgagggcctgaaagaggccgacaaggacgagttctgcagatgcgagctgaagctgcagaagtggtacggcgatctgagaggcaagcccttcgccattgaggccgagaacagcatcctggacatcagcggcttcagcaagcagtacaactgcgccttcatttggcagaaagacggcgtcaagaaactgaacctgtacctgatcatcaattacttcaaaggcggcaagctgcggttcaagaagatcaaacccgaggccttcgaggctaacagattctacaccgtgatcaacaaaaagtccggcgagatcgtgcccatggaagtgaacttcaacttcgacgaccccaacctgattatcctgcctctggccttcggcaagagacagggcagagagttcatctggaacgatctgctgagcctggaaaccggctctctgaagctggccaatggcagagtgatcgagaaaaccctgtacaacaggagaaccagacaggacgagcctgctctgtttgtggccctgaccttcgagagaagagaggtgctggacagcagcaacatcaagcccatgaacctgatcggcgtggaccggggcgagaatatccctgctgtgatcgccctgacagaccctgaaggatgcccactgagcagattcaaggactccctgggcaaccctacacacatcctgagaatcggcgagagctacaaagagaagcagaggacaatccaggccaagaaagaggtggaacagagaagagccggcggatactctaggaagtacgccagcaaggccaagaatctggccaacgacatggtccgaaacaccgccagagatctgctgtactacgccgtgacacaggacgccatgctgatcttcgagaatctgagcagaggcttcggccggcagggcaagagaacctttatggccgagaggcagtacaccagaatggaagattggctcacagctaaactggcctacgagggactgagcaagacctacctgtccaaaacactggcccagtatacctccaagacctgcagcaattgcggcttcaccatcaccagcgccgactacgacagagtgctggaaaagctcaagaaaaccgccaccggctggatgaccaccatcaacggcaaagagctgaaggttgagggccagatcacctactacaacaggaggaagaggcagaacgtcgtgaaggatctgagcgtggaactggacagactgagcgaagagagcgtgaacaacgacatcagcagctggacaaagggcagatcaggcgaggctctgagcctgctgaagaagaggtttagccacagacctgtgcaagagaagttcgtgtgcctgaactgcggcttcgagacacacgccgatgaacaggctgccctgaacattgccagaagctggctgttcctgagaagccaagagtacaagaagtaccagaccaacaagaccaccggcaacaccgacaagagggcctttgtggaaacctggcagagcttctacagaaaaaagctgaaagaagtctggaagcccgccgtg

SEQ ID NO: 88 - DNA, 2931 bp, synthetic construct
  misc_feature 1..2931: note = CasX variant
  source 1..2931: mol_type = other DNA
caagagatcaagagaatcaacaagatcagaaggagactggtcaaggacagcaacacaaagaaggccggcaagacaggccccatgaaaaccctgctcgtcagagtgatgacccctgacctgagagagcggctggaaaacctgagaaagaagcccgagaacatccctcagcctatcagcaacaccagcagggccaacctgaacaagctgctgaccgactacaccgagatgaagaaagccatcctgcacgtgtactgggaagagttccagaaagaccccgtgggcctgatgagcagagttgctcagcctgccagcaagaagatcgaccagaacaagctgaagcccgagatggacgagaagggcaatctgaccacagccggctttgcctgctctcagtgtggccagcctctgttcgtgtacaagctggaacaggtgtccgagaaaggcaaggcctacaccaactacttcggcagatgtaacgtggccgagcacgagaagctgattctgctggcccagctgaaacctgagaaggactctgatgaggccgtgacctacagcctgggcaagtttggacagagagccctggacttctacagcatccacgtgaccaaagaaagcacacaccccgtgaagcccctggctcagatcgccggcaatagatacgcctctggacctgtgggcaaagccctgtccgatgcctgcatgggaacaatcgccagcttcctgagcaagtaccaggacatcatcatcgagcaccagaaggtggtcaagggcaaccagaagagactggaaagcctgagggagctggccggcaaagagaacctggaataccccagcgtgaccctgcctcctcagcctcacacaaaagaaggcgtggacgcctacaacgaagtgatcgccagagtgagaatgtgggtcaacctgaacctgtggcagaagctgaaactgtccagggacgacgccaagcctctgctgagactgaagggcttccctagcttccctctggtggaaagacaggccaatgaagtggattggtgggacatggtctgcaacgtgaagaagctgatcaacgagaagaaagaggatggcaaggttttctggcagaacctggccggctacaagagacaagaagccctgaggccttacctgagcagccccgaggaccggaagaagggcaagaagttcgccagataccagctgggcgacctgctgctgcacctggaaaagaagcacggcgaggactggggcaaagtgtacgatgaggcctgggagagaatcgacaagaaggtggaaggcctgagcaagcacattaagctggaagaggaaagaaggagcgaggacgcccaatctaaagccgctctgaccgattggctgagagccaaggccagctttgtgatcgagggcctgaaagaggccgacaaggacgagttctgcagatgcgagctgaagctgcagaagtggtacggcgatctgagaggcaagcccttcgccattgaggccgagaacagcatcctggacatcagcggcttcagcaagcagtacaactgcgccttcatttggcagaaagacggcgtcaagaaactgaacctgtacctgatcatcaattacttcaaaggcggcaagctgcggttcaagaagatcaaacccgaggccttcgaggctaacagattctacaccgtgatcaacaaaaagtccggcgagatcgtgcccatggaagtgaacttcaacttcgacgaccccaacctgattatcctgcctctggccttcggcaagagacagggcagagagttcatctggaacgatctgctgagcctggaaaccggctctctgaagctggccaatggcagagtgatcgagaaacccctgtacaacaggagaaccagacaggacgagcctgctctgtttgtggccctgaccttcgagagaagagaggtgctggacagcagcaacatcaagcccatgaacctgatcggcgtggaccggggcgagaatatccctgctgtgatcgccctgacagaccctgaaggatgcccactgagcagattcaaggactccctgggcaaccctacacacatcctgagaatcggcgagagctacaaagagaagcagaggacaatccaggccaagaaagaggtggaacagagaagagccggcggatactctaggaagtacgccagcaaggccaagaatctggccgacgacatggtccgaaacaccgccagagatctgctgtactacgccgtgacacaggacgccatgctgatcttcgagaatctgagcagaggcttcggccggcagggcaagagaacctttatggccgagaggcagtacaccagaatggaagattggctcacagctaaactggcctacgagggactgagcaagacctacctgtccaaaacactggcccagtatacctccaagacctgcagcaattgcggcttcaccatcaccagcgccgactacgacagagtgctggaaaagctcaagaaaaccgccaccggctggatgaccaccatcaacggcaaagagctgaaggttgagggccagatcacctactacaacaggaggaagaggcagaacgtcgtgaaggatctgagcgtggaactggacagactgagcgaagagagcgtgaacaacgacatcagcagctggacaaagggcagatcaggcgaggctctgagcctgctgaagaagaggtttagccacagacctgtgcaagagaagttcgtgtgcctgaactgcggcttcgagacacacgccgatgaacaggctgccctgaacattgccagaagctggctgttcctgagaagccaagagtacaagaagtaccagaccaacaagaccaccggcaacaccgacaagagggcctttgtggaaacctggcagagcttctacagaaaaaagctgaaagaagtctggaagcccgccgtg

SEQ ID NO: 89 - protein, 977 aa, synthetic construct
  REGION 1..977: note = CasX variant
QEIKRINKIRRRLVKDSNTKKAGKTGPMKTLLVRVMTPDLRERLENLRKKPENIPQPISNTSRANLNKLLTDYTEMKKAILHVYWEEFQKDPVGLMSRVAQPASKKIDQNKLKPEMDEKGNLTTAGFACSQCGQPLFVYKLEQVSEKGKAYTNYFGRCNVAEHEKLILLAQLKPEKDSDEAVTYSLGKFGQRALDFYSIHVTKESTHPVKPLAQIAGNRYASGPVGKALSDACMGTIASFLSKYQDIIIEHQKVVKGNQKRLESLRELAGKENLEYPSVTLPPQPHTKEGVDAYNEVIARVRMWVNLNLWQKLKLSRDDAKPLLRLKGFPSFPLVERQANEVDWWDMVCNVKKLINEKKEDGKVFWQNLAGYKRQEALRPYLSSEEDRKKGKKFARYQFGDLLLHLEKKHGEDWGKVYDEAWERIDKKVEGLSKHIKLEEERRSEDAQSKAALTDWLRAKASFVIEGLKEADKDEFCRCELKLQKWYGDLRGKPFAIEAENSILDISGFSKQYNCAFIWQKDGVKKLNLYLIINYFKGGKLRFKKIKPEAFEANRFYTVINKKSGEIVPMEVNFNFDDPNLIILPLAFGKRQGREFIWNDLLSLETGSLKLANGRVIEKTLYNRRTRQDEPALFVALTFERREVLDSSNIKPMNLIGIDRGENIPAVIALTDPEGCPLSRFKDSLGNPTHILRIGESYKEKQRTIQAKKEVEQRRAGGYSRKYASKAKNLADDMVRNTARDLLYYAVTQDAMLIFENLSRGFGRQGKRTFMAERQYTRMEDWLTAKLAYEGLSKTYLSKTLAQYTSKTCSNCGFTITSADYDRVLEKLKKTATGWMTTINGKELKVEGQITYYNRYKRQNVVKDLSVELDRLSEESVNNDISSWTKGRSGEALSLLKKRFSHRPVQEKFVCLNCGFETHADEQAALNIARSWLFLRSQEYKKYQTNKTTGNTDKRAFVETWQSFYRKKLKEVWKPAV

SEQ ID NO: 90 - protein, 977 aa, synthetic construct
  REGION 1..977: note = CasX variant
QEIKRINKIRRRLVKDSNTKKAGKTGPMKTLLVRVMTPDLRERLENLRKKPENIPQPISNTSRANLNKLLTDYTEMKKAILHVYWEEFQKDPVGLMSRVAQPASKKIDQNKLKPEMDEKGNLTTAGFACSQCGQPLFVYKLEQVSEKGKAYTNYFGRCNVAEHEKLILLAQLKPEKDSDEAVTYSLGKFGQRALDFYSIHVTKESTHPVKPLAQIAGNRYASGPVGKALSDACMGTIASFLSKYQDIIIEHQKVVKGNQKRLESLRELAGKENLEYPSVTLPPQPHTKEGVDAYNEVIARVRMWVNLNLWQKLKLSRDDAKPLLRLKGFPSFPLVERQANEVDWWDMVCNVKKLINEKKEDGKVFWQNLAGYKRQEALRPYLSSEEDRKKGKKFARYQLGDLLLHLEKKHGEDWGKVYDEAWERIDKKVEGLSKHIKLEEERRSEDAQSKAALTDWLRAKASFVIEGLKEADKDEFCRCELKLQKWYGDLRGKPFAIEAENSILDISGFSKQYNCAFIWQKDGVKKLNLYLIINYFKGGKLRFKKIKPEAFEANRFYTVINKKSGEIVPMEVNFNFDDPNLIILPLAFGKRQGREFIWNDLLSLETGSLKLANGRVIEKTLYNRRTRQDEPALFVALTFERREVLDSSNIKPMNLIGVDRGENIPAVIALTDPEGCPLSRFKDSLGNPTHILRIGESYKEKQRTIQAKKEVEQRRAGGYSRKYASKAKNLADDMVRNTARDLLYYAVTQDAMLIFENLSRGFGRQGKRTFMAERQYTRMEDWLTAKLAYEGLSKTYLSKTLAQYTSKTCSNCGFTITSADYDRVLEKLKKTATGWMTTINGKELKVEGQITYYNRYKRQNVVKDLSVELDRLSEESVNNDISSWTKGRSGEALSLLKKRFSHRPVQEKFVCLNCGFETHADEQAALNIARSWLFLRSQEYKKYQTNKTTGNTDKRAFVETWQSFYRKKLKEVWKPAV

SEQ ID NO: 91 - protein, 978 aa, synthetic construct
  REGION 1..978: note = CasX variant
QEIKRINKIRRRLVKDSNTKKAGKTGPMKTLLVRVMTPDLRERLENLRKKPENIPQPISNTSRANLNKLLTDYTEMKKAILHVYWEEFQKDPVGLMSRVAQPASKKIDQNKLKPEMDEKGNLTTAGFACSQCGQPLFVYKLEQVSEKGKAYTNYFGRCNVAEHEKLILLAQLKPEKDSDEAVTYSLGKFGQRALDFYSIHVTKESTHPVKPLAQIAGNRYASGPVGKALSDACMGTIASFLSKYQDIIIEHQKVVKGNQKRLESLRELAGKENLEYPSVTLPPQPHTKEGVDAYNEVIARVRMWVNLNLWQKLKLSRDDAKPLLRLKGFPSFPLVERQANEVDWWDMVCNVKKLINEKKEDGKVFWQNLAGYKRQEALRPYLSSEEDRKKGKKFARYQLGDLLLHLEKKHGEDWGKVYDEAWERIDKKVEGLSKHIKLEEERRSEDAQSKAALTDWLRAKASFVIEGLKEADKDEFCRCELKLQKWYGDLRGKPFAIEAENSILDISGFSKQYNCAFIWQKDGVKKLNLYLIINYFKGGKLRFKKIKPEAFEANRFYTVINKKSGEIVPMEVNFNFDDPNLIILPLAFGKRQGREFIWNDLLSLETGSLKLANGRVIEKTLYNRRTRQDEPALFVALTFERREVLDSSNIKPMNLIGVDRGENIPAVIALTDPEGCPLSRFKDSLGNPTHILRIGESYKEKQRTIQAKKEVEQRRAGGYSRKYASKAKNLADDMVRNTARDLLYYAVTQDAMLIFENLSRGFGRQGKRTFMAERQYTRMEDWLTAKLAYEGLPSKTYLSKTLAQYTSKTCSNCGFTITSADYDRVLEKLKKTATGWMTTINGKELKVEGQITYYNRYKRQNVVKDLSVELDRLSEESVNNDISSWTKGRSGEALSLLKKRFSHRPVQEKFVCLNCGFETHADEQAALNIARSWLFLRSQEYKKYQTNKTTGNTDKRAFVETWQSFYRKKLKEVWKPAV

SEQ ID NO: 92 - protein, 978 aa, synthetic construct
  REGION 1..978: note = CasX variant
QEIKRINKIRRRLVKDSNTKKAGKTRGPMKTLLVRVMTPDLRERLENLRKKPENIPQPISNTSRANLNKLLTDYTEMKKAILHVYWEEFQKDPVGLMSRVAQPASKKIDQNKLKPEMDEKGNLTTAGFACSQCGQPLFVYKLEQVSEKGKAYTNYFGRCNVAEHEKLILLAQLKPEKDSDEAVTYSLGKFGQRALDFYSIHVTKESTHPVKPLAQIAGNRYASGPVGKALSDACMGTIASFLSKYQDIIIEHQKVVKGNQKRLESLRELAGKENLEYPSVTLPPQPHTKEGVDAYNEVIARVRMWVNLNLWQKLKLSRDDAKPLLRLKGFPSFPLVERQANEVDWWDMVCNVKKLINEKKEDGKVFWQNLAGYKRQEALRPYLSSEEDRKKGKKFARYQLGDLLLHLEKKHGEDWGKVYDEAWERIDKKVEGLSKHIKLEEERRSEDAQSKAALTDWLRAKASFVIEGLKEADKDEFCRCELKLQKWYGDLRGKPFAIEAENSILDISGFSKQYNCAFIWQKDGVKKLNLYLIINYFKGGKLRFKKIKPEAFEANRFYTVINKKSGEIVPMEVNFNFDDPNLIILPLAFGKRQGREFIWNDLLSLETGSLKLANGRVIEKTLYNRRTRQDEPALFVALTFERREVLDSSNIKPMNLIGVDRGENIPAVIALTDPEGCPLSRFKDSLGNPTHILRIGESYKEKQRTIQAKKEVEQRRAGGYSRKYASKAKNLADDMVRNTARDLLYYAVTQDAMLIFENLSRGFGRQGKRTFMAERQYTRMEDWLTAKLAYEGLSKTYLSKTLAQYTSKTCSNCGFTITSADYDRVLEKLKKTATGWMTTINGKELKVEGQITYYNRYKRQNVVKDLSVELDRLSEESVNNDISSWTKGRSGEALSLLKKRFSHRPVQEKFVCLNCGFETHADEQAALNIARSWLFLRSQEYKKYQTNKTTGNTDKRAFVETWQSFYRKKLKEVWKPAV

SEQ ID NO: 93 - protein, 978 aa, synthetic construct
  REGION 1..978: note = CasX variant
QEIKRINKIRRRLVKDSNTKKAGKTGPMKTLLVRVMTPDLRERLENLRKKPENIPQPISNTSRANLNKLLTDYTEMKKAILHVYWEEFQKDPVGLMSRVAQPASKKIDQNKLKPEMDEKGNLTTAGFACSQCGQPLFVYKLEQVSEKGKAYTNYFGRCNVAEHEKLILLAQLKPEKDSDEAVTYSLGKFGQRALDFYSIHVTKESTHPVKPLAQIAGNRYASSPVGKALSDACMGTIASFLSKYQDIIIEHQKVVKGNQKRLESLRELAGKENLEYPSVTLPPQPHTKEGVDAYNEVIARVRMWVNLNLWQKLKLSRDDAKPLLRLKGFPSFPLVERQANEVDWWDMVCNVKKLINEKKEDGKVFWQNLAGYKRQEALRPYLSSEEDRKKGKKFARYQLGDLLLHLEKKHGEDWGKVYDEAWERIDKKVEGLSKHIKLEEERRSEDAQSKAALTDWLRAKASFVIEGLKEADKDEFCRCELKLQKWYGDLRGKPFAIEAENSILDISGFSKQYNCAFIWQKDGVKKLNLYLIINYFKGGKLRFKKIKPEAFEANRFYTVINKKSGEIVPMEVNFNFDDPNLIILPLAFGKRQGREFIWNDLLSLETGSLKLANGRVIEKTLYNRRTRQDEPALFVALTFERREVLDSSNIKPMNLIGVDRGENIPAVIALTDPEGCPLSRFKDSLGNPTHILRIGESYKEKQRTIQAKKEVEQRRAGGYSRKYASKAKNLADDMVRNTARDLLYYAVTQDAMLIFENLSRGFGRQGKRTFMAERQYTRMEDWLTAKLAYEGLPSKTYLSKTLAQYTSKTCSNCGFTITSADYDRVLEKLKKTATGWMTTINGKELKVEGQITYYNRYKRQNVVKDLSVELDRLSEESVNNDISSWTKGRSGEALSLLKKRFSHRPVQEKFVCLNCGFETHADEQAALNIARSWLFLRSQEYKKYQTNKTTGNTDKRAFVETWQSFYRKKLKEVWKPAV

SEQ ID NO: 94 - protein, 978 aa, synthetic construct
  REGION 1..978: note = CasX variant
QEIKRINKIRRRLVKDSNTKKAGKTGPMKTLLVRVMTPDLRERLENLRKKPENIPQPISNTSRANLNKLLTDYTEMKKAILHVYWEEFQKDPVGLMSRVAQPASKKIDQNKLKPEMDEKGNLTTAGFACSQCGQPLFVYKLEQVSEKGKAYTNYFGRCNVAEHEKLILLAQLKPEKDSDEAVTYSLGKFGQRALDFYSIHVTKESTHPVKPLAQIAGNRYASTPVGKALSDACMGTIASFLSKYQDIIIEHQKVVKGNQKRLESLRELAGKENLEYPSVTLPPQPHTKEGVDAYNEVIARVRMWVNLNLWQKLKLSRDDAKPLLRLKGFPSFPLVERQANEVDWWDMVCNVKKLINEKKEDGKVFWQNLAGYKRQEALRPYLSSEEDRKKGKKFARYQLGDLLLHLEKKHGEDWGKVYDEAWERIDKKVEGLSKHIKLEEERRSEDAQSKAALTDWLRAKASFVIEGLKEADKDEFCRCELKLQKWYGDLRGKPFAIEAENSILDISGFSKQYNCAFIWQKDGVKKLNLYLIINYFKGGKLRFKKIKPEAFEANRFYTVINKKSGEIVPMEVNFNFDDPNLIILPLAFGKRQGREFIWNDLLSLETGSLKLANGRVIEKTLYNRRTRQDEPALFVALTFERREVLDSSNIKPMNLIGVDRGENIPAVIALTDPEGCPLSRFKDSLGNPTHILRIGESYKEKQRTIQAKKEVEQRRAGGYSRKYASKAKNLADDMVRNTARDLLYYAVTQDAMLIFENLSRGFGRQGKRTFMAERQYTRMEDWLTAKLAYEGLPSKTYLSKTLAQYTSKTCSNCGFTITSADYDRVLEKLKKTATGWMTTINGKELKVEGQITYYNRYKRQNVVKDLSVELDRLSEESVNNDISSWTKGRSGEALSLLKKRFSHRPVQEKFVCLNCGFETHADEQAALNIARSWLFLRSQEYKKYQTNKTTGNTDKRAFVETWQSFYRKKLKEVWKPAV

SEQ ID NO: 95 - protein, 978 aa, synthetic construct
  REGION 1..978: note = CasX variant
QEIKRINKIRRRLVKDSNTKKAGKTGPMKTLLVRVMTPDLRERLENLRKKPENIPQPISNTSRANLNKLLTDYTEMKKAILHVYWEEFQKDPVGLMSRVAQPASKKIDQNKLKPEMDEKGNLTTAGFACSQCGQPLFVYKLEQVSEKGKAYTNYFGRCNVAEHEKLILLAQLKPEKDSDEAVTYSLGKFGQRALDFYSIHVTKESTHPVKPLAQIAGNRYASAPVGKALSDACMGTIASFLSKYQDIIIEHQKVVKGNQKRLESLRELAGKENLEYPSVTLPPQPHTKEGVDAYNEVIARVRMWVNLNLWQKLKLSRDDAKPLLRLKGFPSFPLVERQANEVDWWDMVCNVKKLINEKKEDGKVFWQNLAGYKRQEALRPYLSSEEDRKKGKKFARYQLGDLLLHLEKKHGEDWGKVYDEAWERIDKKVEGLSKHIKLEEERRSEDAQSKAALTDWLRAKASFVIEGLKEADKDEFCRCELKLQKWYGDLRGKPFAIEAENSILDISGFSKQYNCAFIWQKDGVKKLNLYLIINYFKGGKLRFKKIKPEAFEANRFYTVINKKSGEIVPMEVNFNFDDPNLIILPLAFGKRQGREFIWNDLLSLETGSLKLANGRVIEKTLYNRRTRQDEPALFVALTFERREVLDSSNIKPMNLIGVDRGENIPAVIALTDPEGCPLSRFKDSLGNPTHILRIGESYKEKQRTIQAKKEVEQRRAGGYSRKYASKAKNLADDMVRNTARDLLYYAVTQDAMLIFENLSRGFGRQGKRTFMAERQYTRMEDWLTAKLAYEGLPSKTYLSKTLAQYTSKTCSNCGFTITSADYDRVLEKLKKTATGWMTTINGKELKVEGQITYYNRYKRQNVVKDLSVELDRLSEESVNNDISSWTKGRSGEALSLLKKRFSHRPVQEKFVCLNCGFETHADEQAALNIARSWLFLRSQEYKKYQTNKTTGNTDKRAFVETWQSFYRKKLKEVWKPAV

SEQ ID NO: 96 - protein, 978 aa, synthetic construct
  REGION 1..978: note = CasX variant
QEIKRINKIRRRLVKDSNTKKAGKTGPMKTLLVRVMTPDLRERLENLRKKPENIPQPISNTSRANLNKLLTDYTEMKKAILHVYWEEFQKDPVGLMSRVAQPASKKIDQNKLKPEMDEKGNLTTAGFACSQCGQPLFVYKLEQVSEKGKAYTNYFGRCNVAEHEKLIKLAQLKPEKDSDEAVTYSLGKFGQRALDFYSIHVTKESTHPVKPLAQIAGNRYASGPVGKALSDACMGTIASFLSKYQDIIIEHQKVVKGNQKRLESLRELAGKENLEYPSVTLPPQPHTKEGVDAYNEVIARVRMWVNLNLWQKLKLSRDDAKPLLRLKGFPSFPLVERQANEVDWWDMVCNVKKLINEKKEDGKVFWQNLAGYKRQEALRPYLSSEEDRKKGKKFARYQLGDLLLHLEKKHGEDWGKVYDEAWERIDKKVEGLSKHIKLEEERRSEDAQSKAALTDWLRAKASFVIEGLKEADKDEFCRCELKLQKWYGDLRGKPFAIEAENSILDISGFSKQYNCAFIWQKDGVKKLNLYLIINYFKGGKLRFKKIKPEAFEANRFYTVINKKSGEIVPMEVNFNFDDPNLIILPLAFGKRQGREFIWNDLLSLETGSLKLANGRVIEKTLYNRRTRQDEPALFVALTFERREVLDSSNIKPMNLIGVDRGENIPAVIALTDPEGCPLSRFKDSLGNPTHILRIGESYKEKQRTIQAKKEVEQRRAGGYSRKYASKAKNLADDMVRNTARDLLYYAVTQDAMLIFENLSRGFGRQGKRTFMAERQYTRMEDWLTAKLAYEGLPSKTYLSKTLAQYTSKTCSNCGFTITSADYDRVLEKLKKTATGWMTTINGKELKVEGQITYYNRYKRQNVVKDLSVELDRLSEESVNNDISSWTKGRSGEALSLLKKRFSHRPVQEKFVCLNCGFETHADEQAALNIARSWLFLRSQEYKKYQTNKTTGNTDKRAFVETWQSFYRKKLKEVWKPAV

SEQ ID NO: 97 - protein, 977 aa, synthetic construct
  REGION 1..977: note = CasX variant
QEIKRINKIRRRLVKDSNTKKAGKTGPMKTLLVRVMTPDLRERLENLRKKPENIPQPISNTSRANLNKLLTDYTEMKKAILHVYWEEFQKDPVGLMSRVAQPASKKIDQNKLKPEMDEKGNLTTAGFACSQCGQPLFVYKLEQVSEKGKAYTNYFGRCNVAEHEKLILLAQLKPEKDSDEAVTYSLGKFGQRALDFYSIHVTKESTHPVKPLAQIAGNRYASGPVGKALSDACMGTIASFLSKYQDIIIEHQKVVKGNQKRLESLRELAGKENLEYPSVTLPPQPHTKEGVDAYNEVIARVRMWVNLNLWQKLKLSRDDAKPLLRLKGFPSFPLVERQANEVDWWDMVCNVKKLINEKKEDGKVFWQNLAGYKRQEALRPYLSSPEDRKKGKKFARYQFGDLLLHLEKKHGEDWGKVYDEAWERIDKKVEGLSKHIKLEEERRSEDAQSKAALTDWLRAKASFVIEGLKEADKDEFCRCELKLQKWYGDLRGKPFAIEAENSILDISGFSKQYNCAFIWQKDGVKKLNLYLIINYFKGGKLRFKKIKPEAFEANRFYTVINKKSGEIVPMEVNFNFDDPNLIILPLAFGKRQGREFIWNDLLSLETGSLKLANGRVIEKTLYNRRTRQDEPALFVALTFERREVLDSSNIKPMNLIGVDRGENIPAVIALTDPEGCPLSRFKDSLGNPTHILRIGESYKEKQRTIQAKKEVEQRRAGGYSRKYASKAKNLANDMVRNTARDLLYYAVTQDAMLIFENLSRGFGRQGKRTFMAERQYTRMEDWLTAKLAYEGLSKTYLSKTLAQYTSKTCSNCGFTITSADYDRVLEKLKKTATGWMTTINGKELKVEGQITYYNRRKRQNVVKDLSVELDRLSEESVNNDISSWTKGRSGEALSLLKKRFSHRPVQEKFVCLNCGFETHADEQAALNIARSWLFLRSQEYKKYQTNKTTGNTDKRAFVETWQSFYRKKLKEVWKPAV

SEQ ID NO: 98 - protein, 977 aa, synthetic construct
  REGION 1..977: note = CasX variant
QEIKRINKIRRRLVKDSNTKKAGKTGPMKTLLVRVMTPDLRERLENLRKKPENIPQPISNTSRANLNKLLTDYTEMKKAILHVYWEEFQKDPVGLMSRVAQPASKKIDQNKLKPEMDEKGNLTTAGFACSQCGQPLFVYKLEQVSEKGKAYTNYFGRCNVAEHEKLILLAQLKPEKDSDEAVTYSLGKFGQRALDFYSIHVTKESTHPVKPLAQIAGNRYASGPVGKALSDACMGTIASFLSKYQDIIIEHQKVVKGNQKRLESLRELAGKENLEYPSVTLPPQPHTKEGVDAYNEVIARVRMWVNLNLWQKLKLSRDDAKPLLRLKGFPSFPLVERQANEVDWWDMVCNVKKLINEKKEDGKVFWQNLAGYKRQEALRPYLSSEEDRKKGKKFARYQLGDLLLHLEKKHGEDWGKVYDEAWERIDKKVEGLSKHIKLEEERRSEDAQSKAALTDWLRAKASFVIEGLKEADKDEFSRCELKLQKWYGDLRGKPFAIEAENSILDISGFSKQYNCAFIWQKDGVKKLNLYLIINYFKGGKLRFKKIKPEAFEANRFYTVINKKSGEIVPMEVNFNFDDPNLIILPLAFGKRQGREFIWNDLLSLETGSLKLANGRVIEKTLYNRRTRQDEPALFVALTFERREVLDSSNIKPMNLIGVDRGENIPAVIALTDPEGCPLSRFKDSLGNPTHILRIGESYKEKQRTIQAKKEVEQRRAGGYSRKYASKAKNLADDMVRNTARDLLYYAVTQDAMLIFENLSRGFGRQGKRTFMAERQYTRMEDWLTAKLAYEGLSKTYLSKTLAQYTSKTCSNCGFTITSADYDRVLEKLKKTATGWMTTINGKELKVEGQITYYNRRKRQNVVKDLSVELDRLSEESVNNDISSWTKGRSGEALSLLKKRFSHRPVQEKFVCLNCGFETHADEQAALNIARSWLFLRSQEYKKYQTNKTTGNTDKRAFVETWQSFYRKKLKEVWKPAV

SEQ ID NO: 99 - protein, 977 aa, synthetic construct
  REGION 1..977: note = CasX variant
QEIKRINKIRRRLVKDSNTKKAGKTGPMKTLLVRVMTPDLRERLENLRKKPENIPQPISNTSRANLNKLLTDYTEMKKAILHVYWEEFQKDPVGLMSRVAQPASKKIDQNKLKPEMDEKGNLTTAGFACSQCGQPLFVYKLEQVSEKGKAYTNYFGRCNVAEHEKLILLAQLKPEKDSDEAVTYSLGKFGQRALDFYSIHVTKESTHPVKPLAQIAGNRYASGPVGKALSDACMGTIASFLSKYQDIIIEHQKVVKGNQKRLESLRELAGKENLEYPSVTLPPQPHTKEGVDAYNEVIARVRMWVNLNLWQKLKLSRDDAKPLLRLKGFPSFPLVERQANEVDWWDMVCNVKKLINEKKEDGKVFWQNLAGYKRQEALRPYLSSENDRKKGKKFARYQFGDLLKHLEKKHGEDWGKVYDEAWERIDKKVEGLSKHIKLEEERRSEDAQSKAALTDWLRAKASFVIEGLKEADKDEFSRCELKLQKWYGDLRGKPFAIEAENSILDISGFSKQYNCAFIWQKDGVKKLNLYLIINYFKGGKLRFKKIKPEAFEANRFYTVINKKSGEIVPMEVNFNFDDPNLIILPLAFGKRQGREFIWNDLLSLETGSLKLANGRVIEKTLYNRRTRQDEPALFVALTFERREVLDSSNIKPMNLIGVDRGENIPAVIALTDPEGCPLSRFKDSLGNPTHILRIGESYKEKQRTIQAKKEVEQRRAGGYSRKYASKAKNLADDMVRNTARDLLYYAVTQDAMLIFENLSRGFGRQGKRTFMAERQYTRMEDWLTAKLAYEGLSKTLLSKTLAQYTSKTCSNCGFTITSADYDRVLEKLKKTATGWMTTINGKELKVEGQITYYNRRKRQNVVKDLSVELDRLSEESVNNDISSWTKGRSGEALSLLKKRFSHRPVQEKFVCLNCGFETHADEQAALNIARSWLFLRSQEYKKYQTNKTTGNTDKRAFVETWQSFYRKKLKEVWKPAV

SEQ ID NO: 100 - protein, 977 aa, synthetic construct
  REGION 1..977: note = CasX variant
QEIKRINKIRRRLVKDSNTKKAGKTGPMKTLLVRVMTPDLRERLENLRKKPENIPQPISNTSRANLNKLLTDYTEMKKAILHVYWEEFQKDPVGLMSRVAQPASKKIDQNKLKPEMDEKGNLTTAGFACSQCGQPLFVYKLEQVSEKGKAYTNYFGRCNVAEHEKLILLAQLKPEKDSDEAVTYSLGKFGQRALDFYSIHVTKESTHPVKPLAQIAGNRYASGPVGKALSDACMGTIASFLSKYQDIIIEHQKVVKGNQKRLESLRELAGKENLEYPSVTLPPQPHTKEGVDAYNEVIARVRMWVNLNLWQKLKLSRDDAKPLLRLKGFPSFPLVERQANEVDWWDMVCNVKKLINEKKEDGKVFWQNLAGYKRQEALRPYLSSPEDRKKGKKFARYQLGDLLLHLEKKHGEDWGKVYDEAWERIDKKVEGLSKHIKLEEERRSEDAQSKAALTDWLRAKASFVIEGLKEADKDEFCRCELKLQKWYGDLRGKPFAIEAENSILDISGFSKQYNCAFIWQKDGVKKLNLYLIINYFKGGKLRFKKIKPEAFEANRFYTVINKKSGEIVPMEVNFNFDDPNLIILPLAFGKRQGREFIWNDLLSLETGSLKLANGRVIEKTLYNRRTRQDEPALFVALTFERREVLDSSNIKPMNLIGVDRGENIPAVIALTDPEGCPLSRFKDSLGNPTHILRIGESYKEKQRTIQAKKEVEQRRAGGYSRKYASKAKNLANDMVRNTARDLLYYAVTQDAMLIFENLSRGFGRQGKRTFMAERQYTRMEDWLTAKLAYEGLSKTYLSKTLAQYTSKTCSNCGFTITSADYDRVLEKLKKTATGWMTTINGKELKVEGQITYYNRRKRQNVVKDLSVELDRLSEESVNNDISSWTKGRSGEALSLLKKRFSHRPVQEKFVCLNCGFETHADEQAALNIARSWLFLRSQEYKKYQTNKTTGNTDKRAFVETWQSFYRKKLKEVWKPAV

SEQ ID NO: 101 - protein, 977 aa, synthetic construct
  REGION 1..977: note = CasX variant
QEIKRINKIRRRLVKDSNTKKAGKTGPMKTLLVRVMTPDLRERLENLRKKPENIPQPISNTSRANLNKLLTDYTEMKKAILHVYWEEFQKDPVGLMSRVAQPASKKIDQNKLKPEMDEKGNLTTAGFACSQCGQPLFVYKLEQVSEKGKAYTNYFGRCNVAEHEKLILLAQLKPEKDSDEAVTYSLGKFGQRALDFYSIHVTKESTHPVKPLAQIAGNRYASGPVGKALSDACMGTIASFLSKYQDIIIEHQKVVKGNQKRLESLRELAGKENLEYPSVTLPPQPHTKEGVDAYNEVIARVRMWVNLNLWQKLKLSRDDAKPLLRLKGFPSFPLVERQANEVDWWDMVCNVKKLINEKKEDGKVFWQNLAGYKRQEALRPYLSSPEDRKKGKKFARYQLGDLLLHLEKKHGEDWGKVYDEAWERIDKKVEGLSKHIKLEEERRSEDAQSKAALTDWLRAKASFVIEGLKEADKDEFCRCELKLQKWYGDLRGKPFAIEAENSILDISGFSKQYNCAFIWQKDGVKKLNLYLIINYFKGGKLRFKKIKPEAFEANRFYTVINKKSGEIVPMEVNFNFDDPNLIILPLAFGKRQGREFIWNDLLSLETGSLKLANGRVIEKPLYNRRTRQDEPALFVALTFERREVLDSSNIKPMNLIGVDRGENIPAVIALTDPEGCPLSRFKDSLGNPTHILRIGESYKEKQRTIQAKKEVEQRRAGGYSRKYASKAKNLADDMVRNTARDLLYYAVTQDAMLIFENLSRGFGRQGKRTFMAERQYTRMEDWLTAKLAYEGLSKTYLSKTLAQYTSKTCSNCGFTITSADYDRVLEKLKKTATGWMTTINGKELKVEGQITYYNRRKRQNVVKDLSVELDRLSEESVNNDISSWTKGRSGEALSLLKKRFSHRPVQEKFVCLNCGFETHADEQAALNIARSWLFLRSQEYKKYQTNKTTGNTDKRAFVETWQSFYRKKLKEVWKPAV

SEQ ID NO: 102 - DNA, 60 bp, synthetic construct; identical to SEQ ID NO: 28
  misc_feature 1..60: note = in vitro cleavage assay target
  source 1..60: mol_type = other DNA

SEQ ID NO: 103 - DNA, 60 bp, synthetic construct
  misc_feature 1..60: note = in vitro cleavage assay target
  source 1..60: mol_type = other DNA
agcgcgagcacagctaaggccacggagcgagacatctcggcccgaatgctgtcagcttca

SEQ ID NO: 104 - DNA, 60 bp, synthetic construct; identical to SEQ ID NO: 28
  misc_feature 1..60: note = in vitro cleavage assay target
  source 1..60: mol_type = other DNA

SEQ ID NO: 105 - DNA, 60 bp, synthetic construct
  misc_feature 1..60: note = in vitro cleavage assay target
  source 1..60: mol_type = other DNA
agcgcgagcacagctaaggccacggagcgagacatctcggcccgagtgctgtcagcttca

SEQ ID NO: 106 - DNA, 60 bp, synthetic construct
  misc_feature 1..60: note = in vitro cleavage assay target
  source 1..60: mol_type = other DNA
tgaagctgacagcactcgggccgagatgtctcgctccgtggccttagctgtgctcgcgct

SEQ ID NO: 107 - DNA, 60 bp, synthetic construct
  misc_feature 1..60: note = in vitro cleavage assay target
  source 1..60: mol_type = other DNA
agcgcgagcacagctaaggccacggagcgagacatctcggcccgactgctgtcagcttca

SEQ ID NO: 108 - DNA, 60 bp, synthetic construct
  misc_feature 1..60: note = in vitro cleavage assay target
  source 1..60: mol_type = other DNA
tgaagctgacagcagtcgggccgagatgtctcgctccgtggccttagctgtgctcgcgct

SEQ ID NO: 109 - DNA, 60 bp, synthetic construct
  misc_feature 1..60: note = in vitro cleavage assay target
  source 1..60: mol_type = other DNA
agcgcgagcacagctaaggccacggagcgagacatctcggcccgattgctgtcagcttca

SEQ ID NO: 110 - DNA, 60 bp, synthetic construct
  misc_feature 1..60: note = in vitro cleavage assay target
  source 1..60: mol_type = other DNA
tgaagctgacagcaatcgggccgagatgtctcgctccgtggccttagctgtgctcgcgct

SEQ ID NO: 111 - DNA, 60 bp, synthetic construct; identical to SEQ ID NO: 103
  misc_feature 1..60: note = in vitro cleavage assay target
  source 1..60: mol_type = other DNA

SEQ ID NO: 112 - DNA, 60 bp, synthetic construct; identical to SEQ ID NO: 28
  misc_feature 1..60: note = in vitro cleavage assay target
  source 1..60: mol_type = other DNA

SEQ ID NO: 113 - DNA, 60 bp, synthetic construct; identical to SEQ ID NO: 105
  misc_feature 1..60: note = in vitro cleavage assay target
  source 1..60: mol_type = other DNA

SEQ ID NO: 114 - DNA, 60 bp, synthetic construct; identical to SEQ ID NO: 106
  misc_feature 1..60: note = in vitro cleavage assay target
  source 1..60: mol_type = other DNA

SEQ ID NO: 115 - DNA, 60 bp, synthetic construct; identical to SEQ ID NO: 107
  misc_feature 1..60: note = in vitro cleavage assay target
  source 1..60: mol_type = other DNA

SEQ ID NO: 116 - DNA, 60 bp, synthetic construct; identical to SEQ ID NO: 108
  misc_feature 1..60: note = in vitro cleavage assay target
  source 1..60: mol_type = other DNA

SEQ ID NO: 117 - DNA, 60 bp, synthetic construct; identical to SEQ ID NO: 109
  misc_feature 1..60: note = in vitro cleavage assay target
  source 1..60: mol_type = other DNA

SEQ ID NO: 118 - DNA, 60 bp, synthetic construct; identical to SEQ ID NO: 110
  misc_feature 1..60: note = in vitro cleavage assay target
  source 1..60: mol_type = other DNA

SEQ ID NO: 119 - DNA, 60 bp, synthetic construct
  misc_feature 1..60: note = in vitro cleavage assay target
  source 1..60: mol_type = other DNA
agcgcgagcacagctaaggccacggagcgagacatctcggcccaaatgctgtcagcttca

SEQ ID NO: 120 - DNA, 60 bp, synthetic construct
  misc_feature 1..60: note = in vitro cleavage assay target
  source 1..60: mol_type = other DNA
tgaagctgacagcatttgggccgagatgtctcgctccgtggccttagctgtgctcgcgct

SEQ ID NO: 121 - DNA, 60 bp, synthetic construct
  misc_feature 1..60: note = in vitro cleavage assay target
  source 1..60: mol_type = other DNA
agcgcgagcacagctaaggccacggagcgagacatctcggccctagtgctgtcagcttca

SEQ ID NO: 122 - DNA, 60 bp, synthetic construct
  misc_feature 1..60: note = in vitro cleavage assay target
  source 1..60: mol_type = other DNA
tgaagctgacagcacttgggccgagatgtctcgctccgtggccttagctgtgctcgcgct

SEQ ID NO: 123 - DNA, 60 bp, synthetic construct
  misc_feature 1..60: note = in vitro cleavage assay target
  source 1..60: mol_type = other DNA
agcgcgagcacagctaaggccacggagcgagacatctcggccctactgctgtcagcttca

SEQ ID NO: 124 - DNA, 60 bp, synthetic construct
  misc_feature 1..60: note = in vitro cleavage assay target
  source 1..60: mol_type = other DNA
tgaagctgacagcagttgggccgagatgtctcgctccgtggccttagctgtgctcgcgct

SEQ ID NO: 125 - DNA, 60 bp, synthetic construct
  misc_feature 1..60: note = in vitro cleavage assay target
  source 1..60: mol_type = other DNA
agcgcgagcacagctaaggccacggagcgagacatctcggccctattgctgtcagcttca

SEQ ID NO: 126 - DNA, 60 bp, synthetic construct
  misc_feature 1..60: note = in vitro cleavage assay target
  source 1..60: mol_type = other DNA
tgaagctgacagcaattgggccgagatgtctcgctccgtggccttagctgtgctcgcgct

SEQ ID NO: 127 - DNA, 89 bp, synthetic construct
  misc_feature 1..89: note = 5' or 3' gNA extension
  source 1..89: mol_type = other DNA
gggtcggcatggcatctccacctcctcgcggtccgacctgggcatccgaaggaggacgcacgtccactcggatggctaagggagagcca

SEQ ID NO: 128 - DNA, 86 bp, synthetic construct
  misc_feature 1..86: note = 5' or 3' gNA extension
  source 1..86: mol_type = other DNA
ggccggcatggtcccagcctcctcgctggcgccggctgggcaacattccgaggggaccgtcccctcggtaatggcgaatgggaccc

SEQ ID NO: 129 - DNA, 69 bp, synthetic construct
  misc_feature 1..69: note = 5' or 3' gNA extension
  source 1..69: mol_type = other DNA
gatggccggcatggtcccagcctcctcgctggcgccggctgggcaacaccttcgggtggcgaatgggac

SEQ ID NO: 130 - DNA, 78 bp, synthetic construct
  misc_feature 1..78: note = 5' or 3' gNA extension
  source 1..78: mol_type = other DNA
ttttggccggcatggtcccagcctcctcgctggcgccggctgggcaacatgcttcggcatggcgaatgggaccccggg

SEQ ID NO: 131 - DNA, 78 bp, synthetic construct
  misc_feature 1..78: note = 5' or 3' gNA extension
  source 1..78: mol_type = other DNA
cattcctcagaaaatgacaaacctgtggggcgtaagtagatcttcggatctatgatcgtgcagacgttaaaatcaggt

SEQ ID NO: 132 - DNA, 64 bp, synthetic construct
  misc_feature 1..64: note = 5' or 3' gNA extension
  source 1..64: mol_type = other DNA
cgtggttagggccacgttaaatagttgcttaagccctaagcgttgatcttcggatcaggtgcaa

SEQ ID NO: 133 - DNA, 60 bp, synthetic construct
  misc_feature 1..60: note = 5' or 3' gNA extension
  source 1..60: mol_type = other DNA
gggagccccgctgatgaggtcggggagaccgaaagggacttcggtccctacggggctccc

SEQ ID NO: 134 - DNA, 52 bp, synthetic construct
  misc_feature 1..52: note = 5' or 3' gNA extension
  source 1..52: mol_type = other DNA
cctgtcaccggatgtgctttccggtctgatgagtccgtgaggacgaaacagg

SEQ ID NO: 135 - DNA, 63 bp, synthetic construct
  misc_feature 1..63: note = 5' or 3' gNA extension
  source 1..63: mol_type = other DNA
cgactactgatgagtccgtgaggacgaaacgagtaagctcgtctagtcgcgtgtagcgaagca

SEQ ID NO: 136 - DNA, 49 bp, synthetic construct
  misc_feature 1..49: note = 5' or 3' gNA extension
  source 1..49: mol_type = other DNA
cgactactgatgagtccgtgaggacgaaacgagtaagctcgtctagtcg

SEQ ID NO: 137 - DNA, 63 bp, synthetic construct
  misc_feature 1..63: note = 5' or 3' gNA extension
  source 1..63: mol_type = other DNA
ccagtactgatgagtccgtgaggacgaaacgagtaagctcgtctactggcgcttttatctcat

SEQ ID NO: 138 - DNA, 77 bp, synthetic construct
  misc_feature 1..77: note = 5' or 3' gNA extension
  source 1..77: mol_type = other DNA
acccgcaaggccgacggcatccgccgccgctggtgcaagtccagccgccccttcgggggcgggcgctcatgggtaac

SEQ ID NO: 139 - DNA, 76 bp, synthetic construct
  misc_feature 1..76: note = 5' or 3' gNA extension
  source 1..76: mol_type = other DNA
ggcaataaagcggttacaagcccgcaaaaatagcagagtaatgtcgcgatagcgcggcattaatgcagctttattg

SEQ ID NO: 140 - DNA, 36 bp, synthetic construct
  misc_feature 1..36: note = 5' or 3' gNA extension
  source 1..36: mol_type = other DNA
ccacccccaccaccacccccacccccaccaccaccc

SEQ ID NO: 141 - DNA, 40 bp, synthetic construct
  misc_feature 1..40: note = PCR1 Fwd primer
  misc_difference 34..40: note = n is any nucleotide
  source 1..40: mol_type = other DNA
acactctttccctacacgacgctcttccgatctnnnnnnn

SEQ ID NO: 142 - DNA, 34 bp, synthetic construct
  misc_feature 1..34: note = PCR2 Rvs primer
  source 1..34: mol_type = other DNA
gtgactggagttcagacgtgtgctcttccgatct

SEQ ID NO: 143 - DNA, 52 bp, synthetic construct
  misc_feature 1..52: note = PCR2 Fwd primer
  source 1..52: mol_type = other DNA
aatgatacggcgaccaccgagatctacactctttccctacacgacgctcttc

SEQ ID NO: 144 - DNA, 64 bp, synthetic construct
  misc_feature 1..64: note = PCR2 Rvs v1 001 primer
  source 1..64: mol_type = other DNA
caagcagaagacggcatacgagatcgtgatgtgactggagttcagacgtgtgctcttccgatct

SEQ ID NO: 145 - DNA, 168 bp, synthetic construct
  misc_feature 1..168: note = Planctomyces reference guide scaffold from the plasmid backbone
  source 1..168: mol_type = other DNA
tgacagctagctcagtcctaggtataatactagttactggcgcttttatctcattactttgagagccatcaccagcgactatgtcgtatgggtaaagcgcttatttatcggagagaaatccgataaataagaagcatcaaagctggagttgtcccaattcttctagag

SEQ ID NO: 146 - DNA, 82 bp, synthetic construct
  misc_feature 1..82: note = PCR primer SAH24
  source 1..82: mol_type = other DNA
ttcaggttggaccggtgccaccatggccccaaagaagaagcggaaggtcagccaagagatcaagagaatcaacaagatcaga

SEQ ID NO: 147 - DNA, 28 bp, synthetic construct
  misc_feature 1..28: note = PCR primer SAH25
  source 1..28: mol_type = other DNA
ttttggactagtcacggcgggcttccag

SEQ ID NO: 148 - DNA, 37 bp, synthetic construct
  misc_feature 1..37: note = PCR primer oIC539
  source 1..37: mol_type = other DNA
atggccccaaagaagaagcggaaggtctctagacaag

SEQ ID NO: 149 - DNA, 32 bp, synthetic construct
  misc_feature 1..32: note = PCR primer oIC540
  source 1..32: mol_type = other DNA
tacctttctcttcttttttggactagtcacgg

SEQ ID NO: 150 - RNA, 20 nt, synthetic construct
  misc_feature 1..20: note = spacer 4.76
  source 1..20: mol_type = other RNA
tgtggtcggggtagcggctg

SEQ ID NO: 151 - RNA, 20 nt, synthetic construct
  misc_feature 1..20: note = spacer 4.77
  source 1..20: mol_type = other RNA
tcaagtccgccatgcccgaa

SEQ ID NO: 152 - RNA, 20 nt, synthetic construct
  misc_feature 1..20: note = spacer 8.2
  source 1..20: mol_type = other RNA
atgttcatgagtttggagat

SEQ ID NO: 153 - RNA, 20 nt, synthetic construct
  misc_feature 1..20: note = spacer 8.4
  source 1..20: mol_type = other RNA
tcgccataactcgctaggcc

SEQ ID NO: 154 - DNA, 20 bp, synthetic construct
  misc_feature 1..20: note = spacer 23.11
  source 1..20: mol_type = other DNA
tccccgatatgcaccaccgg

SEQ ID NO: 155 - DNA, 20 bp, synthetic construct
  misc_feature 1..20: note = spacer 23.2
  source 1..20: mol_type = other DNA
agagcgtgatattaccctgt

SEQ ID NO: 156 - DNA, 20 bp, synthetic construct
  misc_feature 1..20: note = spacer 23.1
  source 1..20: mol_type = other DNA
cgctctagaatgcgacgggt

SEQ ID NO: 157 - DNA, 20 bp, synthetic construct
  misc_feature 1..20: note = spacer 23.19
  source 1..20: mol_type = other DNA
ccgatatgcaccaccgggta

SEQ ID NO: 158 - RNA, 19 nt, synthetic construct
  misc_feature 1..19: note = triplex loop
  source 1..19: mol_type = other RNA
ctttatctcattactttga

SEQ ID NO: 159 - DNA, 31 bp, synthetic construct
  misc_feature 1..31: note = stem loop sequence
  source 1..31: mol_type = other DNA
  misc_feature 1..27: note = RNA fragment
  misc_feature 28..31: note = DNA fragment
aaaacgctttatctcattactttgacgtttt

SEQ ID NO: 160 - skipped

SEQ ID NO: 161 - DNA, 20 bp, synthetic construct
  misc_feature 1..20: note = 23.2 spacer
  source 1..20: mol_type = other DNA
agagcgtgatattaccctgt

SEQ ID NO: 162 - DNA, 20 bp, synthetic construct
  misc_feature 1..20: note = 23.13 spacer
  source 1..20: mol_type = other DNA
ccctttgacgttggagtcca

SEQ ID NO: 163 - DNA, 20 bp, synthetic construct
  misc_feature 1..20: note = 11.2 spacer
  source 1..20: mol_type = other DNA
aagtggctgcgtaccacacc

SEQ ID NO: 164 - DNA, 20 bp, synthetic construct
  misc_feature 1..20: note = 23.27 spacer
  source 1..20: mol_type = other DNA
gtacatccacaaacagacga

SEQ ID NO: 165 - DNA, 20 bp, synthetic construct
  misc_feature 1..20: note = 15.3 spacer
  source 1..20: mol_type = other DNA
caaacaaatgtgtcacaaag

SEQ ID NO: 166 - DNA, 20 bp, synthetic construct
  misc_feature 1..20: note = 15.5 spacer
  source 1..20: mol_type = other DNA
ggaataatgctgttgttgaa

SEQ ID NO: 167 - DNA, 87 bp, synthetic construct
  misc_feature 1..87: note = Scaffold 174 template fwd primer
  source 1..87: mol_type = other DNA
gaaattaatacgactcactataactggcgcttttatctgattactttgagagccatcaccagcgactatgtcgtagtgggtaaagct

SEQ ID NO: 168 - DNA, 50 bp, synthetic construct
  misc_feature 1..50: note = Scaffold 174 template rev primer
  source 1..50: mol_type = other DNA
ctttgatgctccctccgaagagggagctttacccactacgacatagtcgc

SEQ ID NO: 169 - DNA, 22 bp, synthetic construct
  misc_feature 1..22: note = T7 amplification primer
  source 1..22: mol_type = other DNA
gaaattaatacgactcactata

SEQ ID NO: 170 - DNA, 36 bp, synthetic construct
  misc_feature 1..36: note = 15.3 20-nt spacer primer
  source 1..36: mol_type = other DNA
ctttgtgacacatttgtttgctttgatgctccctcc

SEQ ID NO: 171 - DNA, 35 bp, synthetic construct
  misc_feature 1..35: note = 15.3 19-nt spacer primer
  source 1..35: mol_type = other DNA
tttgtgacacatttgtttgctttgatgctccctcc

SEQ ID NO: 172 - DNA, 34 bp, synthetic construct
  misc_feature 1..34: note = 15.3 18-nt spacer primer
  source 1..34: mol_type = other DNA
ttgtgacacatttgtttgctttgatgctccctcc

SEQ ID NO: 173 - DNA, 36 bp, synthetic construct
  misc_feature 1..36: note = 15.5 20-nt spacer primer
  source 1..36: mol_type = other DNA
ttcaacaacagcattattccctttgatgctccctcc

SEQ ID NO: 174 - DNA, 35 bp, synthetic construct
  misc_feature 1..35: note = 15.5 19-nt spacer primer
  source 1..35: mol_type = other DNA
tcaacaacagcattattccctttgatgctccctcc

SEQ ID NO: 175 - DNA, 34 bp, synthetic construct
  misc_feature 1..34: note = 15.5 18-nt spacer primer
  source 1..34: mol_type = other DNA
caacaacagcattattccctttgatgctccctcc

SEQ ID NO: 176 - RNA, 20 nt, synthetic construct
  misc_feature 1..20: note = 15.3 20-nt spacer
  source 1..20: mol_type = other RNA
caaacaaatgtgtcacaaag

SEQ ID NO: 177 - RNA, 19 nt, synthetic construct
  misc_feature 1..19: note = 15.3 19-nt spacer
  source 1..19: mol_type = other RNA
caaacaaatgtgtcacaaa

SEQ ID NO: 178 - RNA, 18 nt, synthetic construct
  misc_feature 1..18: note = 15.3 18-nt spacer
  source 1..18: mol_type = other RNA
caaacaaatgtgtcacaa

SEQ ID NO: 179 - RNA, 20 nt, synthetic construct
  misc_feature 1..20: note = 15.5 20-nt spacer
  source 1..20: mol_type = other RNA
ggaataatgctgttgttgaa

SEQ ID NO: 180 - RNA, 19 nt, synthetic construct
  misc_feature 1..19: note = 15.5 19-nt spacer
  source 1..19: mol_type = other RNA
ggaataatgctgttgttga

SEQ ID NO: 181 - RNA, 18 nt, synthetic construct
  misc_feature 1..18: note = 15.5 18-nt spacer
  source 1..18: mol_type = other RNA
ggaataatgctgttgttg

SEQ ID NO: 182 - DNA, 20 bp, synthetic construct
  misc_feature 1..20: note = 7.37 spacer
  source 1..20: mol_type = other DNA
ggccgagatgtctcgctccg

SEQ ID NO: 183 - DNA, 60 bp, synthetic construct; identical to SEQ ID NO: 28
  misc_feature 1..60: note = 7.37 target sequence non-target strand
  source 1..60: mol_type = other DNA

SEQ ID NO: 184 - DNA, 60 bp, synthetic construct; identical to SEQ ID NO: 103
  misc_feature 1..60: note = 7.37 target sequence target strand
  source 1..60: mol_type = other DNA

SEQ ID NO: 185 - DNA, 20 bp, synthetic construct
  misc_feature 1..20: note = 20-nt spacer sequence
  source 1..20: mol_type = other DNA
ggccgagatgtctcgctccg

SEQ ID NO: 186 - DNA, 18 bp, synthetic construct
  misc_feature 1..18: note = 18-nt spacer sequence
  source 1..18: mol_type = other DNA
ggccgagatgtctcgctc

SEQ ID NO: 187 - DNA, 19 bp, synthetic construct
  misc_feature 1..19: note = 19-nt spacer sequence
  source 1..19: mol_type = other DNA
ggccgagatgtctcgctcc

SEQ ID NO: 188 - DNA, 87 bp, synthetic construct; identical to SEQ ID NO: 167
  misc_feature 1..87: note = Scaffold 174 template fwd
  source 1..87: mol_type = other DNA

SEQ ID NO: 189 - DNA, 50 bp, synthetic construct; identical to SEQ ID NO: 168
  misc_feature 1..50: note = Scaffold 174 template rev
  source 1..50: mol_type = other DNA

SEQ ID NO: 190 - DNA, 22 bp, synthetic construct
  misc_feature 1..22: note = T7 amplification primer
  source 1..22: mol_type = other DNA
gaaattaatacgactcactata

SEQ ID NO: 191 - DNA, 36 bp, synthetic construct
  misc_feature 1..36: note = Scaffold 174 20-nt spacer primer
  source 1..36: mol_type = other DNA
cggagcgagacatctcggccctttgatgctccctcc

SEQ ID NO: 192 - DNA, 34 bp, synthetic construct
  misc_feature 1..34: note = Scaffold 174 18-nt spacer primer
  source 1..34: mol_type = other DNA
gagcgagacatctcggccctttgatgctccctcc

SEQ ID NO: 193 - DNA, 35 bp, synthetic construct
  misc_feature 1..35: note = Scaffold 174 19-nt spacer primer
  source 1..35: mol_type = other DNA
ggagcgagacatctcggccctttgatgctccctcc

SEQ ID NO: 194 - DNA, 20 bp, synthetic construct
  misc_feature 1..20: note = spacer sequence
  source 1..20: mol_type = other DNA
ctgcattctagttgtggttt

SEQ ID NO: 195 - DNA, 19 bp, synthetic construct
  misc_feature 1..19: note = spacer sequence
  source 1..19: mol_type = other DNA
ctgcattctagttgtggtt

SEQ ID NO: 196 - DNA, 19 bp, synthetic construct
  misc_feature 1..19: note = spacer sequence
  source 1..19: mol_type = other DNA
ctgcattctagttgtggtt

SEQ ID NO: 197 - DNA, 19 bp, synthetic construct
  misc_feature 1..19: note = spacer sequence
  source 1..19: mol_type = other DNA
ctgcattctagttgtggtt

SEQ ID NO: 198 - DNA, 19 bp, synthetic construct
  misc_feature 1..19: note = spacer sequence
  source 1..19: mol_type = other DNA
ctgcattctagttgtggtt

SEQ ID NO: 199 - DNA, 19 bp, synthetic construct
  misc_feature 1..19: note = spacer sequence
  source 1..19: mol_type = other DNA
ctgcattctagttgtggtt

SEQ ID NO: 200 - DNA, 19 bp, synthetic construct
  misc_feature 1..19: note = spacer sequence
  source 1..19: mol_type = other DNA
ctgcattctagttgtggtt

SEQ ID NO: 201 - DNA, 19 bp, synthetic construct
  misc_feature 1..19: note = spacer sequence
  source 1..19: mol_type = other DNA
ctgcattctagttgtggtt

SEQ ID NO: 202 - DNA, 19 bp, synthetic construct
  misc_feature 1..19: note = spacer sequence
  source 1..19: mol_type = other DNA
ctgcattctagttgtggtt

SEQ ID NO: 203 - DNA, 19 bp, synthetic construct
  misc_feature 1..19: note = spacer sequence
  source 1..19: mol_type = other DNA
ctgcattctagttgtggtt

SEQ ID NO: 204 - DNA, 20 bp, synthetic construct
  misc_feature 1..20: note = spacer sequence
  source 1..20: mol_type = other DNA
aaggggctccgcaccacgcc

SEQ ID NO: 205 - DNA, 20 bp, synthetic construct
  misc_feature 1..20: note = spacer sequence
  source 1..20: mol_type = other DNA
aaggggctccgcaccacgcc

SEQ ID NO: 206 - DNA, 20 bp, synthetic construct
  misc_feature 1..20: note = spacer sequence
  source 1..20: mol_type = other DNA
aaggggctccgcaccacgcc

SEQ ID NO: 207 - DNA, 20 bp, synthetic construct
  misc_feature 1..20: note = spacer sequence
  source 1..20: mol_type = other DNA
aaggggctccgcaccacgcc

SEQ ID NO: 208 - DNA, 20 bp, synthetic construct
  misc_feature 1..20: note = spacer sequence
  source 1..20: mol_type = other DNA
aaggggctccgcaccacgcc

SEQ ID NO: 209 - DNA, 20 bp, synthetic construct
  misc_feature 1..20: note = spacer sequence
  source 1..20: mol_type = other DNA
aaggggctccgcaccacgcc

SEQ ID NO: 210 - DNA, 20 bp, synthetic construct
  misc_feature 1..20: note = spacer sequence
  source 1..20: mol_type = other DNA
aaggggctccgcaccacgcc

SEQ ID NO: 211 - DNA, 20 bp, synthetic construct
  misc_feature 1..20: note = spacer sequence
  source 1..20: mol_type = other DNA
aaggggctccgcaccacgcc

SEQ ID NO: 212 - DNA, 20 bp, synthetic construct
  misc_feature 1..20: note = spacer sequence
  source 1..20: mol_type = other DNA
aaggggctccgcaccacgcc

SEQ ID NO: 213 - DNA, 20 bp, synthetic construct
  misc_feature 1..20: note = spacer sequence
  source 1..20: mol_type = other DNA
aaggggctccgcaccacgcc

SEQ ID NO: 214 - DNA, 20 bp, synthetic construct
  misc_feature 1..20: note = spacer sequence
  source 1..20: mol_type = other DNA
aaggggctccgcaccacgcc

SEQ ID NO: 215 - DNA, 20 bp, synthetic construct
  misc_feature 1..20: note = spacer sequence
  source 1..20: mol_type = other DNA
aagtggctccgcaccacgcc

SEQ ID NO: 216 - DNA, 20 bp, synthetic construct
  misc_feature 1..20: note = spacer sequence
  source 1..20: mol_type = other DNA
aaggggctgcgtaccacacc

SEQ ID NO: 217 - DNA, 20 bp, synthetic construct
  misc_feature 1..20: note = spacer sequence
  source 1..20: mol_type = other DNA
aaggggctgcgtaccacacc

SEQ ID NO: 218 - DNA, 18 bp, synthetic construct
  misc_feature 1..18: note = spacer sequence
  source 1..18: mol_type = other DNA
gggtcttcgagaagaccc

SEQ ID NO: 219 - protein, 46 aa, synthetic construct
  REGION 1..46: note = nuclear localization signal
PKKKRKVGGSPKKKRKVSRQEIKRINKIRRRLVKDSNTKKAGKTGP

SEQ ID NO: 220 - protein, 66 aa, synthetic construct
  REGION 1..66: note = nuclear localization signal
PKKKRKVGGSPKKKRKVGGSPKKKRKVGGSPKKKRKVSRQEIKRINKIRRRLVKDSNTKKAGKTGP

SEQ ID NO: 221 - protein, 86 aa, synthetic construct
  REGION 1..86: note = nuclear localization signal
PKKKRKVGGSPKKKRKVGGSPKKKRKVGGSPKKKRKVGGSPKKKRKVGGSPKKKRKVSRQEIKRINKIRRRLVKDSNTKKAGKTGP

SEQ ID NO: 222 - protein, 50 aa, synthetic construct
  REGION 1..50: note = nuclear localization signal
PAAKRVKLDGGSPAAKRVKLDSRQEIKRINKIRRRLVKDSNTKKAGKTGP

SEQ ID NO: 223 - protein, 74 aa, synthetic construct
  REGION 1..74: note = nuclear localization signal
PAAKRVKLDGGSPAAKRVKLDGGSPAAKRVKLDGGSPAAKRVKLDSRQEIKRINKIRRRLVKDSNTKKAGKTGP

SEQ ID NO: 224 - protein, 98 aa, synthetic construct
  REGION 1..98: note = nuclear localization signal
PAAKRVKLDGGSPAAKRVKLDGGSPAAKRVKLDGGSPAAKRVKLDGGSPAAKRVKLDGGSPAAKRVKLDSRQEIKRINKIRRRLVKDSNTKKAGKTGP

SEQ ID NO: 225 - protein, 49 aa, synthetic construct
  REGION 1..49: note = nuclear localization signal
KRPAATKKAGQAKKKKSRDISRQEIKRINKIRRRLVKDSNTKKAGKTGP

SEQ ID NO: 226 - protein, 45 aa, synthetic construct
  REGION 1..45: note = nuclear localization signal
KRPAATKKAGQAKKKKSRQEIKRINKIRRRLVKDSNTKKAGKTGP

SEQ ID NO: 227 - protein, 68 aa, synthetic construct
  REGION 1..68: note = nuclear localization signal
KRPAATKKAGQAKKKKGGSKRPAATKKAGQAKKKKSRDISRQEIKRINKIRRRLVKDSNTKKAGKTGP

SEQ ID NO: 228 - protein, 106 aa, synthetic construct
  REGION 1..106: note = nuclear localization signal
KRPAATKKAGQAKKKKGGSKRPAATKKAGQAKKKKGGSKRPAATKKAGQAKKKKGGSKRPAATKKAGQAKKKKSRDISRQEIKRINKIRRRLVKDSNTKKAGKTGP

SEQ ID NO: 229 - protein, 144 aa, synthetic construct
  REGION 1..144: note = nuclear localization signal
KRPAATKKAGQAKKKKGGSKRPAATKKAGQAKKKKGGSKRPAATKKAGQAKKKKGGSKRPAATKKAGQAKKKKGGSKRPAATKKAGQAKKKKGGSKRPAATKKAGQAKKKKSRDISRQEIKRINKIRRRLVKDSNTKKAGKTGP

SEQ ID NO: 230 - protein, 70 aa, synthetic construct
  REGION 1..70: note = nuclear localization signal
PKKKRKVGGSPKKKRKVGGSPKKKRKVGGSPKKKRKVSRDISRQEIKRINKIRRRLVKDSNTKKAGKTGP

SEQ ID NO: 231 - protein, 78 aa, synthetic construct
  REGION 1..78: note = nuclear localization signal
PAAKRVKLDGGSPAAKRVKLDGGSPAAKRVKLDGGSPAAKRVKLDSRDISRQEIKRINKIRRRLVKDSNTKKAGKTGP

SEQ ID NO: 232 - protein, 102 aa, synthetic construct
  REGION 1..102: note = nuclear localization signal
PAAKRVKLDGGSPAAKRVKLDGGSPAAKRVKLDGGSPAAKRVKLDGGSPAAKRVKLDGGSPAAKRVKLDSRDISRQEIKRINKIRRRLVKDSNTKKAGKTGP

SEQ ID NO: 233 - protein, 65 aa, synthetic construct
  REGION 1..65: note = nuclear localization signal
PAAKRVKLDGGKRTADGSEFESPKKKRKVGGSSRDISRQEIKRINKIRRRLVKDSNTKKAGKTGP

SEQ ID NO: 234 - protein, 67 aa, synthetic construct
  REGION 1..67: note = nuclear localization signal
PAAKRVKLDGGKRTADGSEFESPKKKRKVPPPPGSRDISRQEIKRINKIRRRLVKDSNTKKAGKTGP

SEQ ID NO: 235 - protein, 72 aa, synthetic construct
  REGION 1..72: note = nuclear localization signal
PAAKRVKLDGGKRTADGSEFESPKKKRKVGIHGVPAAPGSRDISRQEIKRINKIRRRLVKDSNTKKAGKTGP

SEQ ID NO: 236 - protein, 72 aa, synthetic construct
  REGION 1..72: note = nuclear localization signal
PAAKRVKLDGGKRTADGSEFESPKKKRKVGGGSGGGSPGSRDISRQEIKRINKIRRRLVKDSNTKKAGKTGP

SEQ ID NO: 237 - RNA, 26 nt, unidentified
  misc_feature 1..26: note = scaffold stem loop of an exemplary reference sgRNA
  source 1..26: mol_type = other RNA
ccatcaccagcgactatgtcgtatgg

SEQ ID NO: 238 - RNA, 46 nt, unidentified
  misc_feature 1..46: note = extended stem loop sequence of an exemplary reference sgRNA
  source 1..46: mol_type = other RNA
gtaaacgcttatttatcggagagaaatccgataaataagaagcatc

SEQ ID NO: 239 - protein, 73 aa, synthetic construct
  REGION 1..73: note = nuclear localization signal
PAAKRVKLDGGKRTADGSEFESPKKKRKVPGGGSGGGSPGSRDISRQEIKRINKIRRRLVKDSNTKKAGKTGP

SEQ ID NO: 240-241 - skipped (2 entries)

SEQ ID NO: 242 - RNA, 20 nt, synthetic construct
  misc_feature 1..20: note = scaffold stem loop sequence of a gNA
  source 1..20: mol_type = other RNA
ccagcgactatgtcgtatgg

SEQ ID NO: 243 - RNA, 23 nt, unidentified
  misc_feature 1..23: note = crRNA sequence
  source 1..23: mol_type = other RNA
ccgataagtaaaacgcatcaaag

SEQ ID NO: 244 - RNA, 26 nt, unidentified
  misc_feature 1..26: note = crRNA sequence
  source 1..26: mol_type = other RNA
tctccgataaataagaagcatcaaag

SEQ ID NO: 245 - RNA, 21 nt, unidentified
  misc_feature 1..21: note = scaffold stem loop
  source 1..21: mol_type = other RNA
ccagcgactatgtcgtagtgg

SEQ ID NO: 246 - skipped

SEQ ID NO: 247 - protein, 978 aa, synthetic construct
  REGION 1..978: note = CasX variant
MQEIKRINKIRRRLVKDSNTKKAGKTGPMKTLLVRVMTPDLRERLENLRKKPENIPQPISNTSRANLNKLLTDYTEMKKAILHVYWEEFQKDPVGLMSRVAQPASKKIDQNKLKPEMDEKGNLTTAGFACSQCGQPLFVYKLEQVSEKGKAYTNYFGRCNVAEHEKLILLAQLKPEKDSDEAVTYSLGKFGQRALDFYSIHVTRESNHPVKPLEQIGGNSCASGPVGKALSDACMGAVASFLTKYQDIILEHQKVIKKNEKRLANLKDIASANGLAFPKITLPPQPHTKEGIEAYNNVVAQIVIWVNLNLWQKLKIGRDEAKPLQRLKGFPSFPLVERQANEVDWWDMVCNVKKLINEKKEDGKVFWQNLAGYKRQEALRPYLSSEEDRKKGKKFARYQFGDLLLHLEKKHGEDWGKVYDEAWERIDKKVEGLSKHIKLEEERRSEDAQSKAALTDWLRAKASFVIEGLKEADKDEFCRCELKLQKWYGDLRGKPFAIEAENSILDISGFSKQYNCAFIWQKDGVKKLNLYLIINYFKGGKLRFKKIKPEAFEANRFYTVINKKSGEIVPMEVNFNFDDPNLIILPLAFGKRQGREFIWNDLLSLETGSLKLANGRVIEKTLYNRRTRQDEPALFVALTFERREVLDSSNIKPMNLIGIDRGENIPAVIALTDPEGCPLSRFKDSLGNPTHILRIGESYKEKQRTIQAKKEVEQRRAGGYSRKYASKAKNLADDMVRNTARDLLYYAVTQDAMLIFENLSRGFGRQGKRTFMAERQYTRMEDWLTAKLAYEGLSKTYLSKTLAQYTSKTCSNCGFTITSADYDRVLEKLKKTATGWMTTINGKELKVEGQITYYNRYKRQNVVKDLSVELDRLSEESVNNDISSWTKGRSGEALSLLKKRFSHRPVQEKFVCLNCGFETHADEQAALNIARSWLFLRSQEYKKYQTNKTTGNTDKRAFVETWQSFYRKKLKEVWKPAV

SEQ ID NO: 248 - protein, 977 aa, synthetic construct
  REGION 1..977: note = CasX variant
MQEIKRINKIRRRLVKDSNTKKAGKTGPMKTLLVRVMTPDLRERLENLRKKPENIPQPISNTSRANLNKLLTDYTEMKKAILHVYWEEFQKDPVGLMSRVAQPAPKNIDQRKLIPVKDGNERLTSSGFACSQCCQPLYVYKLEQVNDKGKPHTNYFGRCNVSEHERLILLSPHKPEANDELVTYSLGKFGQRALDFYSIHVTRESNHPVKPLEQIGGNSCASGPVGKALSDACMGAVASFLTKYQDIILEHQKVIKKNEKRLANLKDIASANGLAFPKITLPPQPHTKEGIEAYNNVVAQIVIWVNLNLWQKLKIGRDEAKPLQRLKGFPSFPLVERQANEVDWWDMVCNVKKLINEKKEDGKVFWQNLAGYKRQEALRPYLSSEEDRKKGKKFARYQFGDLLLHLEKKHGEDWGKVYDEAWERIDKKVEGLSKHIKLEEERRSEDAQSKAALTDWLRAKASFVIEGLKEADKDEFCRCELKLQKWYGDLRGKPFAIEAENSILDISGFSKQYNCAFIWQKDGVKKLNLYLIINYFKGGKLRFKKIKPEAFEANRFYTVINKKSGEIVPMEVNFNFDDPNLIILPLAFGKRQGREFIWNDLLSLETGSLKLANGRVIEKTLYNRRTRQDEPALFVALTFERREVLDSSNIKPMNLIGIDRGENIPAVIALTDPEGCPLSRFKDSLGNPTHILRIGESYKEKQRTIQAKKEVEQRRAGGYSRKYASKAKNLADDMVRNTARDLLYYAVTQDAMLIFENLSRGFGRQGKRTFMAERQYTRMEDWLTAKLAYEGLSKTYLSKTLAQYTSKTCSNCGFTITTADYDGMLVRLKKTSDGWATTLNNKELKAEGQITYYNRYKRQTVEKELSAELDRLSEESGNNDISKWTKGRRDEALFLLKKRFSHRPVQEQFVCLDCGHEVHADEQAALNIARSWLFLRSQEYKKYQTNKTTGNTDKRAFVETWQSFYRKKLKEVWKPAV

SEQ ID NO: 249 - protein, 985 aa, synthetic construct
  REGION 1..985: note = CasX variant
MEKRINKIRKKLSADNATKPVSRSGPMKTLLVRVMTDDLKKRLEKRRKKPEVMPQVISNNAANNLRMLLDDYTKMKEAILQVYWQEFKDDHVGLMCKFAQPAPKNIDQRKLIPVKDGNERLTSSGFACSQCCQPLYVYKLEQVNDKGKPHTNYFGRCNVSEHERLILLSPHKPEANDELVTYSLGKFGQRALDFYSIHVTKESTHPVKPLAQIAGNRYASGPVGKALSDACMGTIASFLSKYQDIIIEHQKVVKGNQKRLESLRELAGKENLEYPSVTLPPQPHTKEGVDAYNEVIARVRMWVNLNLWQKLKLSRDDAKPLLRLKGFPSFPVVERRENEVDWWNTINEVKKLIDAKRDMGRVFWSGVTAEKRNTILEGYNYLPNENDHKKREGSLENPKKPAKRQFGDLLLYLEKKYAGDWGKVFDEAWERIDKKIAGLTSHIEREEARNAEDAQSKAVLTDWLRAKASFVLERLKEMDEKEFYACEIQLQKWYGDLRGNPFAVEAENRVVDISGFSIGSDGHSIQYRNLLAWKYLENGKREFYLLMNYGKKGRIRFTDGTDIKKSGKWQGLLYGGGKAKVIDLTFDPDDEQLIILPLAFGTRQGREFIWNDLLSLETGLIKLANGRVIEKTIYNKKIGRDEPALFVALTFERREVVDPSNIKPVNLIGVDRGENIPAVIALTDPEGCPLPEFKDSSGGPTDILRIGEGYKEKQRAIQAAKEVEQRRAGGYSRKFASKSRNLADDMVRNSARDLFYHAVTHDAVLVFENLSRGFGRQGKRTFMTERQYTKMEDWLTAKLAYEGLTSKTYLSKTLAQYTSKTCSNCGFTITTADYDGMLVRLKKTSDGWATTLNNKELKAEGQITYYNRYKRQTVEKELSAELDRLSEESGNNDISKWTKGRRDEALFLLKKRFSHRPVQEQFVCLDCGHEVHADEQAALNIARSWLFLNSNSTEFKSYKSGKQPFVGAWQAFYKRRLKEVWKPNA

SEQ ID NO: 250 - protein, 986 aa, synthetic construct
  REGION 1..986: note = CasX variant
MEKRINKIRKKLSADNATKPVSRSGPMKTLLVRVMTDDLKKRLEKRRKKPEVMPQVISNNAANNLRMLLDDYTKMKEAILQVYWQEFKDDHVGLMCKFAQPASKKIDQNKLKPEMDEKGNLTTAGFACSQCGQPLFVYKLEQVSEKGKAYTNYFGRCNVAEHEKLILLAQLKPEKDSDEAVTYSLGKFGQRALDFYSIHVTKESTHPVKPLAQIAGNRYASGPVGKALSDACMGTIASFLSKYQDIIIEHQKVVKGNQKRLESLRELAGKENLEYPSVTLPPQPHTKEGVDAYNEVIARVRMWVNLNLWQKLKLSRDDAKPLLRLKGFPSFPVVERRENEVDWWNTINEVKKLIDAKRDMGRVFWSGVTAEKRNTILEGYNYLPNENDHKKREGSLENPKKPAKRQFGDLLLYLEKKYAGDWGKVFDEAWERIDKKIAGLTSHIEREEARNAEDAQSKAVLTDWLRAKASFVLERLKEMDEKEFYACEIQLQKWYGDLRGNPFAVEAENRVVDISGFSIGSDGHSIQYRNLLAWKYLENGKREFYLLMNYGKKGRIRFTDGTDIKKSGKWQGLLYGGGKAKVIDLTFDPDDEQLIILPLAFGTRQGREFIWNDLLSLETGLIKLANGRVIEKTIYNKKIGRDEPALFVALTFERREVVDPSNIKPVNLIGVDRGENIPAVIALTDPEGCPLPEFKDSSGGPTDILRIGEGYKEKQRAIQAAKEVEQRRAGGYSRKFASKSRNLADDMVRNSARDLFYHAVTHDAVLVFENLSRGFGRQGKRTFMTERQYTKMEDWLTAKLAYEGLTSKTYLSKTLAQYTSKTCSNCGFTITSADYDRVLEKLKKTATGWMTTINGKELKVEGQITYYNRYKRQNVVKDLSVELDRLSEESVNNDISSWTKGRSGEALSLLKKRFSHRPVQEKFVCLNCGFETHADEQAALNIARSWLFLNSNSTEFKSYKSGKQPFVGAWQAFYKRRLKEVWKPNA

SEQ ID NO: 251 - protein, 921 aa, synthetic construct
  REGION 1..921: note = CasX variant
MQEIKRINKIRRRLVKDSNTKKAGKTGPMKTLLVRVMTPDLRERLENLRKKPENIPQPISNTSRANLNKLLTDYTEMKKAILHVYWEEFQKDPVGLMSRVAQPAPKNIDQRKLIPVKDGNERLTSSGFACSQCCQPLYVYKLEQVNDKGKPHTNYFGRCNVSEHERLILLSPHKPEANDELVTYSLGKFGQRALDFYSIHVTRESNHPVKPLEQIGGNSCASGPVGKALSDACMGAVASFLTKYQDIILEHQKVIKKNEKRLANLKDIASANGLAFPKITLPPQPHTKEGIEAYNNVVAQIVIWVNLNLWQKLKIGRDEAKPLQRLKGFPSFPLVERQANEVDWWDMVCNVKKLINEKKEDGKVFWQNLAGYKRQEALRPYLSSEEDRKKGKKFARYQFGDLLLHLEKKHGEDWGKVYDEAWERIDKKVEGLSKHIKLEEERRSEDAQSKAALTDWLRAKASFVIEGLKEADKDEFCRCELKLQKWYGDLRGKPFAIEAENSILDISGFSKQYNCAFIWQKDGVKKLNLYLIINYFKGGKLRFKKIKPEAFEANRFYTVINKKSGEIVPMEVNFNFDDPNLIILPLAFGKRQGREFIWNDLLSLETGSLKLANGRVIEKTLYNRRTRQDEPALFVALTFERREVLDSSNIKPVNLIGVDRGENIPAVIALTDPEGCPLPEFKDSSGGPTDILRIGEGYKEKQRAIQAAKEVEQRRAGGYSRKFASKSRNLADDMVRNSARDLFYHAVTHDAVLVFENLSRGFGRQGKRTFMTERQYTKMEDWLTAKLAYEGLTSKTYLSKTLAQYTSKTCSNCGFTITSADYDRVLEKLKKTATGWMTTINGKELKVEGQITYYNRYKRQNVVKDLSVELDRLSEESVNNDISSWTKGRSGEALSLLKKRFSHRPVQEKFVCLNCGFETHA

SEQ ID NO: 252 - protein, 920 aa, synthetic construct
  REGION 1..920: note = CasX variant
MQEIKRINKIRRRLVKDSNTKKAGKTGPMKTLLVRVMTPDLRERLENLRKKPENIPQPISNTSRANLNKLLTDYTEMKKAILHVYWEEFQKDPVGLMSRVAQPAPKNIDQRKLIPVKDGNERLTSSGFACSQCCQPLYVYKLEQVNDKGKPHTNYFGRCNVSEHERLILLSPHKPEANDELVTYSLGKFGQRALDFYSIHVTRESNHPVKPLEQIGGNSCASGPVGKALSDACMGAVASFLTKYQDIILEHQKVIKKNEKRLANLKDIASANGLAFPKITLPPQPHTKEGIEAYNNVVAQIVIWVNLNLWQKLKIGRDEAKPLQRLKGFPSFPLVERQANEVDWWDMVCNVKKLINEKKEDGKVFWQNLAGYKRQEALRPYLSSEEDRKKGKKFARYQFGDLLLHLEKKHGEDWGKVYDEAWERIDKKVEGLSKHIKLEEERRSEDAQSKAALTDWLRAKASFVIEGLKEADKDEFCRCELKLQKWYGDLRGKPFAIEAENSILDISGFSKQYNCAFIWQKDGVKKLNLYLIINYFKGGKLRFKKIKPEAFEANRFYTVINKKSGEIVPMEVNFNFDDPNLIILPLAFGKRQGREFIWNDLLSLETGSLKLANGRVIEKTLYNRRTRQDEPALFVALTFERREVLDSSNIKPMNLIGIDRGENIPAVIALTDPEGCPLSRFKDSLGNPTHILRIGESYKEKQRTIQAKKEVEQRRAGGYSRKYASKAKNLADDMVRNTARDLLYYAVTQDAMLIFENLSRGFGRQGKRTFMAERQYTRMEDWLTAKLAYEGLSKTYLSKTLAQYTSKTCSNCGFTITSADYDRVLEKLKKTATGWMTTINGKELKVEGQITYYNRYKRQNVVKDLSVELDRLSEESVNNDISSWTKGRSGEALSLLKKRFSHRPVQEKFVCLNCGFETHA

SEQ ID NO: 253 - protein, 977 aa, synthetic construct
  REGION 1..977: note = CasX variant
MQEIKRINKIRRRLVKDSNTKKAGKTGPMKTLLVRVMTPDLRERLENLRKKPENIPQPISNNAANNLRMLLDDYTKMKEAILQVYWQEFKDDHVGLMCKFAQPAPKNIDQRKLIPVKDGNERLTSSGFACSQCCQPLYVYKLEQVNDKGKPHTNYFGRCNVSEHERLILLSPHKPEANDELVTYSLGKFGQRALDFYSIHVTKESTHPVKPLAQIAGNRYASGPVGKALSDACMGTIASFLSKYQDIIIEHQKVVKGNQKRLESLRELAGKENLEYPSVTLPPQPHTKEGVDAYNEVIARVRMWVNLNLWQKLKLSRDDAKPLLRLKGFPSFPLVERQANEVDWWDMVCNVKKLINEKKEDGKVFWQNLAGYKRQEALRPYLSSEEDRKKGKKFARYQFGDLLLHLEKKHGEDWGKVYDEAWERIDKKVEGLSKHIKLEEERRSEDAQSKAALTDWLRAKASFVIEGLKEADKDEFCRCELKLQKWYGDLRGKPFAIEAENSILDISGFSKQYNCAFIWQKDGVKKLNLYLIINYFKGGKLRFKKIKPEAFEANRFYTVINKKSGEIVPMEVNFNFDDPNLIILPLAFGKRQGREFIWNDLLSLETGSLKLANGRVIEKTLYNRRTRQDEPALFVALTFERREVLDSSNIKPMNLIGIDRGENIPAVIALTDPEGCPLSRFKDSLGNPTHILRIGESYKEKQRTIQAKKEVEQRRAGGYSRKYASKAKNLADDMVRNTARDLLYYAVTQDAMLIFENLSRGFGRQGKRTFMAERQYTRMEDWLTAKLAYEGLSKTYLSKTLAQYTSKTCSNCGFTITSADYDRVLEKLKKTATGWMTTINGKELKVEGQITYYNRYKRQNVVKDLSVELDRLSEESVNNDISSWTKGRSGEALSLLKKRFSHRPVQEKFVCLNCGFETHADEQAALNIARSWLFLRSQEYKKYQTNKTTGNTDKRAFVETWQSFYRKKLKEVWKPAV

SEQ ID NO: 254 - protein, 986 aa, synthetic construct
  REGION 1..986: note = CasX variant
MQEIKRINKIRRRLVKDSNTKKAGKTGPMKTLLVRVMTPDLRERLENLRKKPENIPQPISNTSRANLNKLLTDYTEMKKAILHVYWEEFQKDPVGLMSRVAQPAPKNIDQRKLIPVKDGNERLTSSGFACSQCCQPLYVYKLEQVNDKGKPHTNYFGRCNVSEHERLILLSPHKPEANDELVTYSLGKFGQRALDFYSIHVTRESNHPVKPLEQIGGNSCASGPVGKALSDACMGAVASFLTKYQDIILEHQKVIKKNEKRLANLKDIASANGLAFPKITLPPQPHTKEGIEAYNNVVAQIVIWVNLNLWQKLKIGRDEAKPLQRLKGFPSFPVVERRENEVDWWNTINEVKKLIDAKRDMGRVFWSGVTAEKRNTILEGYNYLPNENDHKKREGSLENPKKPAKRQFGDLLLYLEKKYAGDWGKVFDEAWERIDKKIAGLTSHIEREEARNAEDAQSKAVLTDWLRAKASFVLERLKEMDEKEFYACEIQLQKWYGDLRGNPFAVEAENSILDISGFSKQYNCAFIWQKDGVKKLNLYLIINYFKGGKLRFKKIKPEAFEANRFYTVINKKSGEIVPMEVNFNFDDPNLIILPLAFGKRQGREFIWNDLLSLETGSLKLANGRVIEKTLYNRRTRQDEPALFVALTFERREVLDSSNIKPMNLIGIDRGENIPAVIALTDPEGCPLSRFKDSLGNPTHILRIGESYKEKQRTIQAKKEVEQRRAGGYSRKYASKAKNLADDMVRNTARDLLYYAVTQDAMLIFENLSRGFGRQGKRTFMAERQYTRMEDWLTAKLAYEGLSKTYLSKTLAQYTSKTCSNCGFTITSADYDRVLEKLKKTATGWMTTINGKELKVEGQITYYNRYKRQNVVKDLSVELDRLSEESVNNDISSWTKGRSGEALSLLKKRFSHRPVQEKFVCLNCGFETHADEQAALNIARSWLFLRSQEYKKYQTNKTTGNTDKRAFVETWQSFYRKKLKEVWKPAV

SEQ ID NO: 255 - protein, 925 aa, synthetic construct
  REGION 1..925: note = CasX variant
MISNTSRANLNKLLTDYTEMKKAILHVYWEEFQKDPVGLMSRVAQPAPKNIDQRKLIPVKDGNERLTSSGFACSQCCQPLYVYKLEQVNDKGKPHTNYFGRCNVSEHERLILLSPHKPEANDELVTYSLGKFGQRALDFYSIHVTRESNHPVKPLEQIGGNSCASGPVGKALSDACMGAVASFLTKYQDIILEHQKVIKKNEKRLANLKDIASANGLAFPKITLPPQPHTKEGIEAYNNVVAQIVIWVNLNLWQKLKIGRDEAKPLQRLKGFPSFPLVERQANEVDWWDMVCNVKKLINEKKEDGKVFWQNLAGYKRQEALRPYLSSEEDRKKGKKFARYQFGDLLLHLEKKHGEDWGKVYDEAWERIDKKVEGLSKHIKLEEERRSEDAQSKAALTDWLRAKASFVIEGLKEADKDEFCRCELKLQKWYGDLRGKPFAIEAENRVVDISGFSIGSDGHSIQYRNLLAWKYLENGKREFYLLMNYGKKGRIRFTDGTDIKKSGKWQGLLYGGGKAKVIDLTFDPDDEQLIILPLAFGTRQGREFIWNDLLSLETGLIKLANGRVIEKTIYNKKIGRDEPALFVALTFERREVVDPSNIKPMNLIGIDRGENIPAVIALTDPEGCPLSRFKDSLGNPTHILRIGESYKEKQRTIQAKKEVEQRRAGGYSRKYASKAKNLADDMVRNTARDLLYYAVTQDAMLIFENLSRGFGRQGKRTFMAERQYTRMEDWLTAKLAYEGLSKTYLSKTLAQYTSKTCSNCGFTITSADYDRVLEKLKKTATGWMTTINGKELKVEGQITYYNRYKRQNVVKDLSVELDRLSEESVNNDISSWTKGRSGEALSLLKKRFSHRPVQEKFVCLNCGFETHADEQAALNIARSWLFLRSQEYKKYQTNKTTGNTDKRAFVETWQSFYRKKLKEVWKPAV

SEQ ID NO: 256 - protein, 975 aa, synthetic construct
  REGION 1..975: note = CasX variant
MEKRINKIRKKLSADNATKPVSRSGPMKTLLVRVMTDDLKKRLEKRRKKPEVMPQVISNTSRANLNKLLTDYTEMKKAILHVYWEEFQKDPVGLMSRVAQPAPKNIDQRKLIPVKDGNERLTSSGFACSQCCQPLYVYKLEQVNDKGKPHTNYFGRCNVSEHERLILLSPHKPEANDELVTYSLGKFGQRALDFYSIHVTRESNHPVKPLEQIGGNSCASGPVGKALSDACMGAVASFLTKYQDIILEHQKVIKKNEKRLANLKDIASANGLAFPKITLPPQPHTKEGIEAYNNVVAQIVIWVNLNLWQKLKIGRDEAKPLQRLKGFPSFPLVERQANEVDWWDMVCNVKKLINEKKEDGKVFWQNLAGYKRQEALRPYLSSEEDRKKGKKFARYQFGDLLLHLEKKHGEDWGKVYDEAWERIDKKVEGLSKHIKLEEERRSEDAQSKAALTDWLRAKASFVIEGLKEADKDEFCRCELKLQKWYGDLRGKPFAIEAENSILDISGFSKQYNCAFIWQKDGVKKLNLYLIINYFKGGKLRFKKIKPEAFEANRFYTVINKKSGEIVPMEVNFNFDDPNLIILPLAFGKRQGREFIWNDLLSLETGSLKLANGRVIEKTLYNRRTRQDEPALFVALTFERREVLDSSNIKPMNLIGIDRGENIPAVIALTDPEGCPLSRFKDSLGNPTHILRIGESYKEKQRTIQAKKEVEQRRAGGYSRKYASKAKNLADDMVRNTARDLLYYAVTQDAMLIFENLSRGFGRQGKRTFMAERQYTRMEDWLTAKLAYEGLSKTYLSKTLAQYTSKTCSNCGFTITSADYDRVLEKLKKTATGWMTTINGKELKVEGQITYYNRYKRQNVVKDLSVELDRLSEESVNNDISSWTKGRSGEALSLLKKRFSHRPVQEKFVCLNCGFETHADEQAALNIARSWLFLRSQEYKKYQTNKTTGNTDKRAFVETWQSFYRKKLKEVWKPAV

SEQ ID NO: 257 - protein, 982 aa, synthetic construct
  REGION 1..982: note = CasX variant
MQEIKRINKIRRRLVKDSNTKKAGKTGPMKTLLVRVMTPDLRERLENLRKKPENIPQPISNTSRANLNKLLTDYTEMKKAILHVYWEEFQKDPVGLMSRVAQPAPKNIDQRKLIPVKDGNERLTSSGFACSQCCQPLYVYKLEQVNDKGKPHTNYFGRCNVSEHERLILLSPHKPEANDELVTYSLGKFGQRALDFYSIHVTRESNHPVKPLEQIGGNSCASGPVGKALSDACMGAVASFLTKYQDIILEHQKVIKKNEKRLANLKDIASANGLAFPKITLPPQPHTKEGIEAYNNVVAQIVIWVNLNLWQKLKIGRDEAKPLQRLKGFPSFPLVERQANEVDWWDMVCNVKKLINEKKEDGKVFWQNLAGYKRQEALRPYLSSEEDRKKGKKFARYQFGDLLLHLEKKHGEDWGKVYDEAWERIDKKVEGLSKHIKLEEERRSEDAQSKAALTDWLRAKASFVIEGLKEADKDEFCRCELKLQKWYGDLRGKPFAIEAENRVVDISGFSIGSDGHSIQYRNLLAWKYLENGKREFYLLMNYGKKGRIRFTDGTDIKKSGKWQGLLYGGGKAKVIDLTFDPDDEQLIILPLAFGTRQGREFIWNDLLSLETGLIKLANGRVIEKTIYNKKIGRDEPALFVALTFERREVVDPSNIKPMNLIGIDRGENIPAVIALTDPEGCPLSRFKDSLGNPTHILRIGESYKEKQRTIQAKKEVEQRRAGGYSRKYASKAKNLADDMVRNTARDLLYYAVTQDAMLIFENLSRGFGRQGKRTFMAERQYTRMEDWLTAKLAYEGLSKTYLSKTLAQYTSKTCSNCGFTITSADYDRVLEKLKKTATGWMTTINGKELKVEGQITYYNRYKRQNVVKDLSVELDRLSEESVNNDISSWTKGRSGEALSLLKKRFSHRPVQEKFVCLNCGFETHADEQAALNIARSWLFLRSQEYKKYQTNKTTGNTDKRAFVETWQSFYRKKLKEVWKPAV

SEQ ID NO: 258 - protein, 977 aa, synthetic construct
  REGION 1..977: note = CasX variant
MQEIKRINKIRRRLVKDSNTKKAGKTGPMKTLLVRVMTPDLRERLENLRKKPENIPQPISNTSRANLNKLLTDYTEMKKAILHVYWEEFQKDPVGLMSRVAQPAPKNIDQRKLIPVKDGNERLTSSGFACSQCCQPLYVYKLEQVNDKGKPHTNYFGRCNVSEHERLILLSPHKPEANDELVTYSLGKFGQRALDFYSIHVTRESNHPVKPLEQIGGNSCASGPVGKALSDACMGAVASFLTKYQDIILEHQKVIKKNEKRLANLKDIASANGLAFPKITLPPQPHTKEGIEAYNNVVAQIVIWVNLNLWQKLKIGRDEAKPLQRLKGFPSFPLVERQANEVDWWDMVCNVKKLINEKKEDGKVFWQNLAGYKRQEALRPYLSSEEDRKKGKKFARYQFGDLLLHLEKKHGEDWGKVYDEAWERIDKKVEGLSKHIKLEEERRSEDAQSKAALTDWLRAKASFVIEGLKEADKDEFKRCELKLQKWYGDLRGKPFAIEAENSILDISGFSKQYNCAFIWQKDGVKKLNLYLIINYFKGGKLRFKKIKPEAFEANRFYTVINKKSGEIVPMEVNFNFDDPNLIILPLAFGKRQGREFIWNDLLSLETGSLKLANGRVIEKPLYNRRTRQDEPALFVALTFERREVLDSSNIKPMNLIGIDRGENIPAVIALTDPEGCPLSRFKDSLGNPTHILRIGESYKEKQRTIQAKKEVEQRRAGGYSRKYASKAKNLADDMVRNTARDLLYYAVTQDAMLIFENLSRGFGRQGKRTFMAERQYTRMEDWLTAKLAYEGLSKTYLSKTLAQYTSKTCSNCGFTITSADYDRVLEKLKKTATGWMTTINGKELKVEGQITYYNRYKRQNVVKDLSVELDRLSEESVNNDISSWTKGRSGEALSLLKKRFSHRPVQEKFVCLNCGFETHADEQAALNIARSWLFLRSQEYKKYQTNKTTGNTDKRAFVETWQSFYRKKLKEVWKPAV

SEQ ID NO: 259 - protein, 977 aa, synthetic construct
  REGION 1..977: note = CasX variant
MQEIKRINKIRRRLVKDSNTKKAGKTGPMKTLLVRVMTPDLRERLENLRKKPENIPQPISNTSRANLNKLLTDYTEMKKAILHVYWEEFQKDPVGLMSRVAQPAPKNIDQRKLIPVKDGNERLTSSGFACSQCCQPLYVYKLEQVNDKGKPHTNYFGRCNVSEHERLILLSPHKPEANDELVTYSLGKFGQRALDFYSIHVTRESNHPVKPLEQIGGNSCASGPVGKALSDACMGAVASFLTKYQDIILEHQKVIKKNEKRLANLKDIASANGLAFPKITLPPQPHTKEGIEAYNNVVAQIVIWVNLNLWQKLKIGRDEAKPLQRLKGFPSFPLVERQANEVDWWDMVCNVKKLINEKKEDGKVFWQNLAGYKRQEALLPYLSSEEDRKKGKKFARYQFGDLLLHLEKKHGEDWGKVYDEAWERIDKKVEGLSKHIKLEEERRSEDAQSKAALTDWLRAKASFVIEGLKEADKDEFCRCELKLQKWYGDLRGKPFAIEAENSILDISGFSKQYNCAFIWQKDGVKKLNLYLIINYFKGGKLRFKKIKPEAFEANRFYTVINKKSGEIVPMEVNFNFDDPNLIILPLAFGKRQGREFIWNDLLSLETGSLKLANGRVIEKTLYNRRTRQDEPALFVALTFERREVLDSSNIKPMNLIGIDRGENIPAVIALTDPEGCPLSRFKDSLGNPTHILRIGESYKEKQRTIQAAKEVEQRRAGGYSRKYASKAKNLADDMVRNTARDLLYYAVTQDAMLIFENLSRGFGRQGKRTFAAERQYTRMEDWLTAKLAYEGLPSKTYLSKTLAQYTSKTCSNCGFTITSADYDRVLEKLKKTATGWMTTINGKELKVEGQITYYNRYKRQNVVKDLSVELDRLSEESVNNDISSWTKGRSGEALSLLKKRFSHRPVQEKFVCLNCGFETHADEQAALNIARSWLFLRSQEYKKYQTNKTTGNTDKRAFVETWQSFYRKKLKEVWKPA

SEQ ID NO: 260 - protein, 977 aa, synthetic construct
  REGION 1..977: note = CasX variant
MQEIKRINKIRRRLVKDSNTKKAGKTGPMKTLLVRVMTPDLRERLENLRKKPENIPQPISNTSRANLNKLLTDYTEMKKAILHVYWEEFQKDPVGLMSRVAQPAPKNIDQRKLIPVKDGNERLTSSGFACSQCCQPLYVYKLEQVNDKGKPHTNYFGRCNVSEHERLILLSPHKPEANDELVTYSLGKFGQRALDFYSIHVTRESNHPVKPLEQIGGNSCASGPVGKALSDACMGAVASFLTKYQDIILEHQKVIKKNEKRLANLKDIASANGLAFPKITLPPQPHTKEGIEAYNNVVAQIVIWVNLNLWQKLKIGRDEAKPLQRLKGFPSFPLVERQANEVDWWDMVCNVKKLINEKKEDGKVFWQNLAGYKRQEALRPYLSSEEDRKKGKKFARYQFGDLLLHLEKKHGEDWGKVYDEAWERIDKKVEGLSKHIKLEEERRSEDAQSKAALTDWLRAKASFVIEGLKEADKDEFCRCELKLQKWYGDLRGKPFAIEAENSILDISGFSKQYNCAFIWQKDGVKKLNLYLIINYFKGGKLRFKKIKPEAFEANRFYTVINKKSGEIVPMEVNFNFDDPNLIILPLAFGKRQGREFIWNDLLSLETGSLKLANGRVIEKTLYNRRTRQDEPALFVALTFERREVLDSSNIKPMNLIGIDRGENIPAVIALTDPEGCPLSRFKDSLGNPTHILRIGESYKEKQRTIQAKKEVEQRRAGGYSRKYASKAKNLANDMVRNTARDLLYYAVTQDAMLIFENLSRGFGRQGKRTFMAERQYTRMEDWLTAKLAYEGLSKTYLSKTLAQYTSKTCSNCGFTITSADYDRVLEKLKKTATGWMTTINGKELKVEGQITYYNRYKRQNVVKDLSVELDRLSEESVNNDISSWTKGRSGEALSLLKKRFSHRPVQEKFVCLNCGFETHADEQAALNIARSWLFLRSQEYKKYQTNKTTGNTDKRAFVETWQSFYRKKLKEVWKPAV

SEQ ID NO: 261 - protein, 978 aa, synthetic construct
  REGION 1..978: note = CasX variant
MQEIKRINKIRRRLVKDSNTKKAGKTGPMKTLLVRVMTPDLRERLENLRKKPENIPQPISNTSRANLNKLLTDYTEMKKAILHVYWEEFQKDPVGLMSRVAQPAPKNIDQRKLIPVKDGNERLTSSGFACSQCCQPLYVYKLEQVNDKGKPHTNYFGRCNVSEHERLILLSPHKPEANDELVTYSLGKFGQRALDFYSIHVTRESNHPVKPLEQIGGNSCASGPVGKALSDACMGAVASFLTKYQDIILEHQKVIKKNEKRLANLKDIASANGLAFPKITLPPQPHTKEGIEAYNNVVAQIVIWVNLNLWQKLKIGRDEAKPLQRLKGFPSFPLVERQANEVDWWDMVCNVKKLINEKKEDGKVFWQNLAGYKRQEALLPYLSSEEDRKKGKKFARYQFGDLLLHLEKKHGEDWGKVYDEAWERIDKKVEGLSKHIKLEEERRSEDAQSKAALTDWLRAKASFVIEGLKEADKDEFCRCELKLQKWYGDLRGKPFAIEAENSILDISGFSKQYNCAFIWQKDGVKKLNLYLIINYFKGGKLRFKKIKPEAFEANRFYTVINKKSGEIVPMEVNFNFDDPNLIILPLAFGKRQGREFIWNDLLSLETGSLKLANGRVIEKTLYNRRTRQDEPALFVALTFERREVLDSSNIKPMNLIGIDRGENIPAVIALTDPEGCPLSRFKDSLGNPTHILRIGESYKEKQRTIQAAKEVEQRRAGGYSRKYASKAKNLADDMVRNTARDLLYYAVTQDAMLIFENLSRGFGRQGKRTFMAERQYTRMEDQLTAKLAYEGLPSKTYLSKTLAQYTSKTCSNCGFTITSADYDRVLEKLKKTATGWMTTINGKELKVEGQITYYNRYKRQNVVKDLSVELDRLSEESVNNDISSWTKGRSGEALSLLKKRFSHRPVQEKFVCLNCGFETHADEQAALNIARSWLFLRSQEYKKYQTNKTTGNTDKRAFVETWQSFYRKKLKEVWKPAV

SEQ ID NO: 262 - protein, 978 aa, synthetic construct
  REGION 1..978: note = CasX variant
MQEIKRINKIRRRLVKDSNTKKAGKTGPMKTLLVRVMTPDLRERLENLRKKPENIPQPISNTSRANLNKLLTDYTEMKKAILHVYWEEFQKDPVGLMSRVAQPAPKNIDQRKLIPVKDGNERLTSSGFACSQCCQPLYVYKLEQVNDKGKPHTNYFGRCNVSEHERLILLSPHKPEANDELVTYSLGKFGQRALDFYSIHVTRESNHPVKPLEQIGGNSCASGPVGKALSDACMGAVASFLTKYQDIILEHQKVIKKNEKRLANLKDIASANGLAFPKITLPPQPHTKEGIEAYNNVVAQIVIWVNLNLWQKLKIGRDEAKPLQRLKGFPSFPLVERQANEVDWWDMVCNVKKLINEKKEDGKVFWQNLAGYKRQEALLPYLSSEEDRKKGKKFARYQFGDLLLHLEKKHGEDWGKVYDEAWERIDKKVEGLSKHIKLEEERRSEDAQSKAALTDWLRAKASFVIEGLKEADKDEFCRCELKLQKWYGDLRGKPFAIEAENSILDISGFSKQYNCAFIWQKDGVKKLNLYLIINYFKGGKLRFKKIKPEAFEANRFYTVINKKSGEIVPMEVNFNFDDPNLIILPLAFGKRQGREFIWNDLLSLETGSLKLANGRVIEKTLYNRRTRQDEPALFVALTFERREVLDSSNIKPMNLIGIDRGENIPAVIALTDPEGCPLSRFKDSLGNPTHILRIGESYKEKQRTIQAAKEVEQRRAGGYSRKYASKAKNLADDMVRNTARDLLYYAVTQDAMLIFENLSRGFGRQGKRTFQAERQYTRMEDWLTAKLAYEGLPSKTYLSKTLAQYTSKTCSNCGFTITSADYDRVLEKLKKTATGWMTTINGKELKVEGQITYYNRYKRQNVVKDLSVELDRLSEESVNNDISSWTKGRSGEALSLLKKRFSHRPVQEKFVCLNCGFETHADEQAALNIARSWLFLRSQEYKKYQTNKTTGNTDKRAFVETWQSFYRKKLKEVWKPAV

SEQ ID NO: 263 - protein, 978 aa, synthetic construct
  REGION 1..978: note = CasX variant
MQEIKRINKIRRRLVKDSNTKKAGKTGPMKTLLVRVMTPDLRERLENLRKKPENIPQPISNTSRANLNKLLTDYTEMKKAILHVYWEEFQKDPVGLMSRVAQPAPKNIDQRKLIPVKDGNERLTSSGFACSQCCQPLYVYKLEQVNDKGKPHTNYFGRCNVSEHERLILLSPHKPEANDELVTYSLGKFGQRALDFYSIHVTRESNHPVKPLEQIGGNSCASGPVGKALSDACMGAVASFLTKYQDIILEHQKVIKKNEKRLANLKDIASANGLAFPKITLPPQPHTKEGIEAYNNVVAQIVIWVNLNLWQKLKIGRDEAKPLQRLKGFPSFPLVERQANEVDWWDMVCNVKKLINEKKEDGKVFWQNLAGYKRQEALLPYLSSEEDRKKGKKFARYQFGDLLLHLEKKHGEDWGKVYDEAWERIDKKVEGLSKHIKLEEERRSEDAQSKAALTDWLIAKASFVIEGLKEADKDEFCRCELKLQKWYGDLRGKPFAIEAENSILDISGFSKQYNCAFIWQKDGVKKLNLYLIINYFKGGKLRFKKIKPEAFEANRFYTVINKKSGEIVPMEVNFNFDDPNLIILPLAFGKRQGREFIWNDLLSLETGSLKLANGRVIEKTLYNRRTRQDEPALFVALTFERREVLDSSNIKPMNLIGIDRGENIPAVIALTDPEGCPLSRFKDSLGNPTHILRIGESYKEKQRTIQAAKEVEQRRAGGYSRKYASKAKNLADDMVRNTVRDLLYYAVTQDAMLIFENLSRGFGRQGKRTFMAERQYTRMEDWLTAKLAYEGLPSKTYLSKTLAQYTSKTCSNCGFTITSADYDRVLEKLKKTATGWMTTINGKELKVEGQITYYNRYKRQNVVKDLSVELDRLSEESVNNDISSWTKGRSGEALSLLKKRFSHRPVQEKFVCLNCGFETHADEQAALNIARSWLFLRSQEYKKYQTNKTTGNTDKRAFVETWQSFYRKKLKEVWKPAV

SEQ ID NO: 264 - protein, 977 aa, synthetic construct
  REGION 1..977: note = CasX variant
MQEIKRINKIRRRLVKDSNTKKAGKTGPMKTLLVRVMTPDLRERLENLRKKPENIPQPISNTSRANLNKLLTDYTEMKKAILHVYWEEFQKDPVGLMSRVAQPAPKNIDQRKLIPVKDGNERLTSSGFACSQCCQPLYVYKLEQVNDKGKPHTNYFGRCNVSEHERLILLSPHKPEANDELVTYSLGKFGQRALDFYSIHVTRESNHPVKPLEQIGGNSCASGPVGKALSDACMGAVASFLTKYQDIILEHQKVIKKNEKRLANLKDIASANGLAFPKITLPPQPHTKEGIEAYNNVVAQIVIWVNLNLWQKLKIGRDEAKPLQRLKGFPSFPLVERQANEVDWWDMVCNVKKLINEKKEDGKVFWQNLAGYKRQEALRPYLSSEEDRKKGKKFARYQFGDLLLHLEKKHGEDWGKVYDEAWERIDKKVEGLSKHIKLEEERRSEDAQSKAALTDWLRAKASFVIEGLKEADKDEFCRCELKLQKWYGDLRGKPFAIEAENSILDISGFSKQYNCAFIWQKDGVKKLNLYLIINYFKGGKLRFKKIKPEAFEANRFYTVINKKSGEIVPMEVNFNFDDPNLIILPLAFGKRQGREFIWNDLLSLETGSLKLANGRVIEKTLYNRRTRQDEPALFVALTFERREVLDSSNIKPMNLIGIDRGENIPAVIALTDPEGCPLSRFKDSLGNPTHILRIGESYKEKQRTIQAKKEVEQRRAGGYSRKYASKAKNLADDMVRNTARDLLYYAVTQDAMLIFENLSRGFGRQGKRTFNAERQYTRMEDWLTAKLAYEGLSKTYLSKTLAQYTSKTCSNCGFTITSADYDRVLEKLKKTATGWMTTINGKELKVEGQITYYNRYKRQNVVKDLSVELDRLSEESVNNDISSWTKGRSGEALSLLKKRFSHRPVQEKFVCLNCGFETHADEQAALNIARSWLFLRSQEYKKYQTNKTTGNTDKRAFVETWQSFYRKKLKEVWKPAV

SEQ ID NO: 265 - protein, 977 aa, synthetic construct
  REGION 1..977: note = CasX variant
MQEIKRINKIRRRLVKDSNTKKAGKTGPMKTLLVRVMTPDLRERLENLRKKPENIPQPISNTSRANLNKLLTDYTEMKKAILHVYWEEFQKDPVGLMSRVAQPAPKNIDQRKLIPVKDGNERLTSSGFACSQCCQPLYVYKLEQVNDKGKPHTNYFGRCNVSEHERLILLSPHKPEANDELVTYSLGKFGQRALDFYSIHVTRESNHPVKPLEQIGGNSCASGPVGKALSDACMGAVASFLTKYQDIILEHQKVIKKNEKRLANLKDIASANGLAFPKITLPPQPHTKEGIEAYNNVVAQIVIWVNLNLWQKLKIGRDEAKPLQRLKGFPSFPLVERQANEVDWWDMVCNVKKLINEKKEDGKVFWQNLAGYKRQEALRPYLSSEEDRKKGKKFARYQFGDLLLHLEKKHGEDWGKVYDEAWERIDKKVEGLSKHIKLEEERRSEDAQSKAALTDWLRAKASFVIEGLKEADKDEFCRCELKLQKWYGDLRGKPFAIEAENSILDISGFSKQYNCAFIWQKDGVKKLNLYLIINYFKGGKLRFKKIKPEAFEANRFYTVINKKSGEIVPMEVNFNFDDPNLIILPLAFGKRQGREFIWNDLLSLETGSLKLANGRVIEKTLYNRRTRQDEPALFVALTFERREVLDSSNIKPMNLIGIDRGENIPAVIALTDPEGCPLSRFKDSLGNPTHILRIGESYKEKQRTIQAKKEVEQRRAGGYSRKYASKAKNLADDMVRNTTRDLLYYAVTQDAMLIFENLSRGFGRQGKRTFMAERQYTRMEDWLTAKLAYEGLSKTYLSKTLAQYTSKTCSNCGFTITSADYDRVLEKLKKTATGWMTTINGKELKVEGQITYYNRYKRQNVVKDLSVELDRLSEESVNNDISSWTKGRSGEALSLLKKRFSHRPVQEKFVCLNCGFETHADEQAALNIARSWLFLRSQEYKKYQTNKTTGNTDKRAFVETWQSFYRKKLKEVWKPAV

SEQ ID NO: 266 - protein, 977 aa, synthetic construct
  REGION 1..977: note = CasX variant
MQEIKRINKIRRRLVKDSNTKKAGKTGPMKTLLVRVMTPDLRERLENLRKKPENIPQPISNTSRANLNKLLTDYTEMKKAILHVYWEEFQKDPVGLMSRVAQPAPKNIDQRKLIPVKDGNERLTSSGFACSQCCQPLYVYKLEQVNDKGKPHTNYFGRCNVSEHERLILLSPHKPEANDELVTYSLGKFGQRALDFYSIHVTRESNHPVKPLEQIGGNSCASGPVGKALSDACMGAVASFLTKYQDIILEHQKVIKKNEKRLANLKDIASANGLAFPKITLPPQPHTKEGIEAYNNVVAQIVIWVNLNLWQKLKIGRDEAKPLQRLKGFPSFPLVERQANEVDWWDMVCNVKKLINEKKEDGKVFWQNLAGYKRQEALRPYLSSEEDRKKGKKFARYQFGDLLLHLEKKHGEDWGKVYDEAWERIDKKVEGLSKHIKLEEERRSEDAQSKAALTDWLRAKASFVIEGLKEADKDEFKRCELKLQKWYGSLRGKPFAIEAENSILDISGFSKQYNCAFIWQKDGVKKLNLYLIINYFKGGKLRFKKIKPEAFEANRFYTVINKKSGEIVPMEVNFNFDDPNLIILPLAFGKRQGREFIWNDLLSLETGSLKLANGRVIEKTLYNRRTRQDEPALFVALTFERREVLDSSNIKPMNLIGIDRGENIPAVIALTDPEGCPLSRFKDSLGNPTHILRIGESYKEKQRTIQAKKEVEQRRAGGYSRKYASKAKNLADDMVRNTARDLLYYAVTQDAMLIFENLSRGFGRQGKRTFMAERQYTRMEDWLTAKLAYEGLSKTYLSKTLAQYTSKTCSNCGFTITSADYDRVLEKLKKTATGWMTTINGKELKVEGQITYYNRYKRQNVVKDLSVELDRLSEESVNNDISSWTKGRSGEALSLLKKRFSHRPVQEKFVCLNCGFETHADEQAALNIARSWLFLRSQEYKKYQTNKTTGNTDKRAFVETWQSFYRKKLKEVWKPAV

SEQ ID NO: 267 - protein, 977 aa, synthetic construct
  REGION 1..977: note = CasX variant
MQEIKRINKIRRRLVKDSNTKKAGKTGPMKTLLVRVMTPDLRERLENLRKKPENIPQPISNTSRANLNKLLTDYTEMKKAILHVYWEEFQKDPVGLMSRVAQPAPKNIDQRKLIPVKDGNERLTSSGFACSQCCQPLYVYKLEQVNDKGKPHTNYFGRCNVSEHERLILLSPHKPEANDELVTYSLGKFGQRALDFYSIHVTRESNHPVKPLEQIGGNSCASGPVGKALSDACMGAVASFLTKYQDIILEHQKVIKKNEKRLANLKDIASANGLAFPKITLPPQPHTKEGIEAYNNVVAQIVIWVNLNLWQKLKIGRDEAKPLQRLKGFPSFPLVERQANEVDWWDMVCNVKKLINEKKEDGKVFWQNLAGYKRQEALRPYLSSEEDRKKGKKFARYQFGDLLLHLEKKHGEDWGKVYDEAWERIDKKVEGLSKHIKLEEERRSEDAQSKAALTDWLRAKASFVIEGLKEADKDEFKRCELKLQKWYGDLRGKPFAIEAENSILDISGFSKQYNCAFIWQKDGVKKLNLYLIINYFKGGKLRFKKIKPEAFEANRFYTVINKKSGEIVPMEVNFNFDDPNLIILPLAFGKRQGREFIWNDLLSLETGSLKLANGRVIEKTLYNRRTRQDEPALFVALTFERREVLDSSNIKPMNLIGIDRGENIPAVIALTDPEGCPLSRFKDSLGNPTHILRIGESYKEKQRTIQAKKEVEQRRAGGYSRKYASKAKNLANDMVRNTARDLLYYAVTQDAMLIFENLSRGFGRQGKRTFMAERQYTRMEDWLTAKLAYEGLSKTYLSKTLAQYTSKTCSNCGFTITSADYDRVLEKLKKTATGWMTTINGKELKVEGQITYYNRYKRQNVVKDLSVELDRLSEESVNNDISSWTKGRSGEALSLLKKRFSHRPVQEKFVCLNCGFETHADEQAALNIARSWLFLRSQEYKKYQTNKTTGNTDKRAFVETWQSFYRKKLKEVWKPAV

SEQ ID NO: 268 - protein, 978 aa, synthetic construct
  REGION 1..978: note = CasX variant
MQEIKRINKIRRRLVKDSNTKKAGKTGPMKTLLVRVMTPDLRERLENLRKKPENIPQPISNTSRANLNKLLTDYTEMKKAILHVYWEEFQKDPVGLMSRVAQPAPKNIDQRKLIPVKDGNERLTSSGFACSQCCQPLYVYKLEQVNDKGKPHTNYFGRCNVSEHERLILLSPHKPEANDELVTYSLGKFGQRALDFYSIHVTRESNHPVKPLEQIGGNSCASGPVGKALSDACMGAVASFLTKYQDIILEHQKVIKKNEKRLANLKDIASANGLAFPKITLPPQPHTKEGIEAYNNVVAQIVIWVNLNLWQKLKIGRDEAKPLQRLKGFPSFPLVERQANEVDWWDMVCNVKKLINEKKEDGKVFWQNLAGYKRQEALLPYLSSEEDRKKGKKFARYQFGDLLLHLEKKHGEDWGKVYDEAWERIDKKVEGLSKHIKLEEERRSEDAQSKAALTDWLRAKASFVIEGLKEADKDEFCRCELKLQKWYGDLRGKPFAIEAENSILDISGFSKQYNCAFIWQKDGVKKLNLYLIINYFKGGKLRFKKIKPEAFEANRFYTVINKKSGEIVPMEVNFNFDDPNLIILPLAFGKRQGREFIWNDLLSLETGSLKLANGRVIEKTLYNRRTRQDEPALFVALTFERREVLDSSNIKPMNLIGIDRGENIPAVIALTDPEGCPLSRFKDSLGNPTHILRIGESYKEKQRTIQAAKEKEQRRAGGYSRKYASKAKNLADDMVRNTARDLLYYAVTQDAMLIFENLSRGFGRQGKRTFMAERQYTRMEDWLTAKLAYEGLPSKTYLSKTLAQYTSKTCSNCGFTITSADYDRVLEKLKKTATGWMTTINGKELKVEGQITYYNRYKRQNVVKDLSVELDRLSEESVNNDISSWTKGRSGEALSLLKKRFSHRPVQEKFVCLNCGFETHADEQAALNIARSWLFLRSQEYKKYQTNKTTGNTDKRAFVETWQSFYRKKLKEVWKPAV

SEQ ID NO: 269 - protein, 977 aa, synthetic construct
  REGION 1..977: note = CasX variant
MQEIKRINKIRRRLVKDSNTKKAGKTGPMKTLLVRVMTPDLRERLENLRKKPENIPQPISNTSRANLNKLLTDYTEMKKAILHVYWEEFQKDPVGLMSRVAQPAPKNIDQRKLIPVKDGNERLTSSGFACSQCCQPLYVYKLEQVNDKGKPHTNYFGRCNVSEHERLILLSPHKPEANDELVTYSLGKFGQRALDFYSIHVTRESNHPVKPLEQIGGNSCASGPVGKALSDACMGAVASFLTKYQDIILEHQKVIKKNEKRLANLKDIASANGLAFPKITLPPQPHTKEGIEAYNNVVAQIVIWVNLNLWQKLKIGRDEAKPLQRLKGFPSFPLVERQANEVDWWDMVCNVKKLINEKKEDGKVFWQNLAGYKRQEALRPYLSSEEDRKKGKKFARYQFGDLLLHLEKKHGEDWGKVYDEAWERIDKKVEGLSKHIKLEEERRSEDAQSKAALTDWLRAKASFVIEGLKEADKDEFKRCELKLQKWYGDLRGKPFAIEAENSILDISGFSKQYNCAFIWQKDGVKKLNLYLIINYFKGGKLRFKKIKPEAFEANRFYTVINKKSGEIVPMEVNFNFDDPNLIILPLAFGKRQGREFIWNDLLSLETGSLKLANGRVIEKTLYNRRTRQDEPALFVALTFERREVLDSSNIKPMNLIGIDRGENIPAVIALTDPEGCPLSRFKDSLGNPTHILRIGESYKEKQRTIQAKKEVEQRRAGGYSRKYASKAKNLADDMVRNTARDLLYYAVTQDAMLIFENLSRGFGRQGKRTFMAERQYTRMEDWLTAKLAYEGLSKTLLSKTLAQYTSKTCSNCGFTITSADYDRVLEKLKKTATGWMTTINGKELKVEGQITYYNRYKRQNVVKDLSVELDRLSEESVNNDISSWTKGRSGEALSLLKKRFSHRPVQEKFVCLNCGFETHADEQAALNIARSWLFLRSQEYKKYQTNKTTGNTDKRAFVETWQSFYRKKLKEVWKPAV

SEQ ID NO: 270 - protein, 977 aa, synthetic construct
  REGION 1..977: note = CasX variant
MQEIKRINKIRRRLVKDSNTKKAGKTGPMKTLLVRVMTPDLRERLENLRKKPENIPQPISNTSRANLNKLLTDYTEMKKAILHVYWEEFQKDPVGLMSRVAQPAPKNIDQRKLIPVKDGNERLTSSGFACSQCCQPLYVYKLEQVNDKGKPHTNYFGRCNVSEHERLILLSPHKPEANDELVTYSLGKFGQRALDFYSIHVTRESNHPVKPLEQIGGNSCASGPVGKALSDACMGAVASFLTKYQDIILEHQKVIKKNEKRLANLKDIASANGLAFPKITLPPQPHTKEGIEAYNNVVAQIVIWVNLNLWQKLKIGRDEAKPLQRLKGFPSFPLVERQANEVDWWDMVCNVKKLINEKKEDGKVFWQNLAGYKRQEALRPYLSSEEDRKKGKKFARYQFGDLLLHLEKKHGEDWGKVYDEAWERIDKKVEGLSKHIKLEEERRSEDAQSKAALTDWLRAKASFVIEGLKEADKDEFCRCELKLQKWYGDLRGKPFAIEAENSILDISGFSKQYNCAFIWQKDGVKKLNLYLIINYFKGGKLRFKKIKPEAFEANRFYTVINKKSGEIVPMEVNFNFDDPNLIILPLAFGKRQGREFIWNDLLSLETGSLKLANGRVIEKTLYNRRTRQDEPALFVALTFERREVLDSSNIKPMNLIGIDRGENIPAVIALTDPEGCPLSRFKDSLGNPTHILRIGESYKEKQRTIQAKKEVEQRRAGGYSRKYASKAKNLADDMVRNTARDLLYYAVTQDAMLIFENLSRGFGRQGKRTFMAERQYTRMEDWLTAKLAYEGLSKTYLSKTLAQYTSKTCSNCGFTITSADYDRVLEKLKKTATGWMTTINGKELKVEGQITYYNRYKRQNVVKDLSVELDRLSEESVNNDISSWTKGRSGEALSLLKKRFSHRPVQEKFVCLNCGFETHADEQAALNIARSWLFLRSQEYKKYQTNKTTGNTDKRAFVETWQSFYRKKLKEVWKPAV

SEQ ID NO: 271 - protein, 977 aa, synthetic construct
  REGION 1..977: note = CasX variant
MQEIKRINKIRRRLVKDSNTKKAGKTGPMKTLLVRVMTPDLRERLENLRKKPENIPQPISNTSRANLNKLLTDYTEMKKAILHVYWEEFQKDPVGLMSRVAQPAPKNIDQRKLIPVKDGNERLTSSGFACSQCCQPLYVYKLEQVNDKGKPHTNYFGRCNVSEHERLILLSPHKPEANDELVTYSLGKFGQRALDFYSIHVTRESNHPVKPLEQIGGNSCASGPVGKALSDACMGAVASFLTKYQDIILEHQKVIKKNEKRLANLKDIASANGLAFPKITLPPQPHTKEGIEAYNNVVAQIVIWVNLNLWQKLKIGRDEAKPLQRLKGFPSFPLVERQANEVDWWDMVCNVKKLINEKKEDGKVFWQNLAGYKRQEALRPYLSSEEDRKKGKKFARYQFGDLLLHLEKKHGEDWGKVYDEAWERIDKKVEGLSKHIKLEEERRSEDAQSKAALTDWLRAKASFVIEGLKEADKDEFKRCELKLQKWYGDLRGKPFAIEAENSILDISGFSKQYNCAFIWQKDGVKKLNLYLIINYFKGGKLRFKKIKPEAFEANRFYTVINKKSGEIVPMEVNFNFDDPNLIILPLAFGKRQGREFIWNDLLSLETGSLKLANGRVIEKTLYNRRTRQDEPALFVALTFERREVLDSSNIKPMNLIGIDRGENIPAVIALTDPEGCPLSRFKDSLGNPTHILRIGESYKEKQRTIQAKKEVEQRRAGGYSRKYASKAKNLADDMVRNTARDLLYYAVTQDAMLIFENLSRGFGRQGKRTFNAERQYTRMEDWLTAKLAYEGLSKTYLSKTLAQYTSKTCSNCGFTITSADYDRVLEKLKKTATGWMTTINGKELKVEGQITYYNRYKRQNVVKDLSVELDRLSEESVNNDISSWTKGRSGEALSLLKKRFSHRPVQEKFVCLNCGFETHADEQAALNIARSWLFLRSQEYKKYQTNKTTGNTDKRAFVETWQSFYRKKLKEVWKPAV

SEQ ID NO: 272 - protein, 977 aa, synthetic construct
  REGION 1..977: note = CasX variant
MQEIKRINKIRRRLVKDSNTKKAGKTGPMKTLLVRVMTPDLRERLENLRKKPENIPQPISNTSRANLNKLLTDYTEMKKAILHVYWEEFQKDPVGLMSRVAQPAPKNIDQRKLIPVKDGNERLTSSGFACSQCCQPLYVYKLEQVNDKGKPHTNYFGRCNVSEHERLILLSPHKPEANDELVTYSLGKFGQRALDFYSIHVTRESNHPVKPLEQIGGNSCASGPVGKALSDACMGAVASFLTKYQDIILEHQKVIKKNEKRLANLKDIASANGLAFPKITLPPQPHTKEGIEAYNNVVAQIVIWVNLNLWQKLKIGRDEAKPLQRLKGFPSFPLVERQANEVDWWDMVCNVKKLINEKKEDGKVFWQNLAGYKRQEALLPYLSSESDRKKGKKFARYQFGDLLLHLEKKHGEDWGKVYDEAWERIDKKVEGLSKHIKLEEERRSEDAQSKAALTDWLRAKASFVIEGLKEADKDEFCRCELKLQKWYGDLRGKPFAIEAENSILDISGFSKQYNCAFIWQKDGVKKLNLYLIINYFKGGKLRFKKIKPEAFEANRFYTVINKKSGEIVPMEVNFNFDDPNLIILPLAFGKRQGREFIWNDLLSLETGSLKLANGRVIEKTLYNRRTRQDEPALFVALTFERREVLDSSNIKPMNLIGIDRGENIPAVIALTDPEGCPLSRFKDSLGNPTHILRIGESYKEKQRTIQAKKEVEQRRAGGYSRKYASKAKNLADDMVRNTARDLLYYAVTQDAMLIFENLSRGFGRQGKRTFMAERQYTRMEDWLTAKLAYEGLSKTYLSKTLAQYTSKTCSNCGFTITSADYDRVLEKLKKTATGWMTTINGKELKVEGQITYYNRYKRQNVVKDLSVELDRLSEESVNNDISSWTKGRSGEALSLLKKRFSHRPVQEKFVCLNCGFETHADEQAALNIARSWLFLRSQEYKKYQTNKTTGNTDKRAFVETWQSFYRKKLKEVWKPAV

SEQ ID NO: 273 - protein, 977 aa, synthetic construct
  REGION 1..977: note = CasX variant
MQEIKRINKIRRRLVKDSNTKKAGKTGPMKTLLVRVMTPDLRERLENLRKKPENIPQPISNTSRANLNKLLTDYTEMKKAILHVYWEEFQKDPVGLMSRVAQPAPKNIDQRKLIPVKDGNERLTSSGFACSQCCQPLYVYKLEQVNDKGKPHTNYFGRCNVSEHERLILLSPHKPEANDELVTYSLGKFGQRALDFYSIHVTRESNHPVKPLEQIGGNSCASGPVGKALSDACMGAVASFLTKYQDIILEHQKVIKKNEKRLANLKDIASANGLAFPKITLPPQPHTKEGIEAYNNVVAQIVIWVNLNLWQKLKIGRDEAKPLQRLKGFPSFPLVERQANEVDWWDMVCNVKKLINEKKEDGKVFWQNLAGYKRQEALRPYLSSEEDRKKGKKFARYQFGDLLLHLEKKHGEDWGKVYDEAWERIDKKVEGLSKHIKLEEERRSEDAQSKAALTDWLRAKASFVIEGLKEADKDEFKRCELKLQKWYGDLRGKPFAIEAENSILDISGFSKQYNCAFIWQKDGVKKLNLYLIINYFKGGKLRFKKIKPEAFEANRFYTVINKKSGEIVPMEVNFNFDDPNLIILPLAFGKRQGREFIWNDLLSLETGSLKLANGRVIEKTLYNRRTRQDEPALFVALTFERREVLDSSNIKPMNLIGIDRGENIPAVIALTDPEGCPLSRFKDSLGNPTHILRIGESYKEKQRTIQAKKEVEQRRAGGYSRKYASKAKNLADDMVRNTARDLLYYAVTQDAMLIFENLSRGFGRQGKRTFMAERQYTRMEDWLTAKLAYEGLSKTYLSKTLAQYTSKTCSNCGFTITSADYDRVLEKLKKTATGWMTTINGKELKVEGQITYYNRYKRQNVVKDLSVELDRLSEESVNNDISSWTKGRSGEALSLLKKRFSHRPVQEKFVCLNCGFETHADEQAALNIARSWLFLRSQEYKKYQTNKTTGNTDKRAFVETWQSFYRKKLKEVWKPAV

SEQ ID NO: 274 - protein, 978 aa, synthetic construct
  REGION 1..978: note = CasX variant
MQEIKRINKIRRRLVKDSNTKKAGKTGPMKTLLVRVMTPDLRERLENLRKKPENIPQPISNTSRANLNKLLTDYTEMKKAILHVYWEEFQKDPVGLMSRVAQPAPKNIDQRKLIPVKDGNERLTSSGFACSQCCQPLYVYKLEQVNDKGKPHTNYFGRCNVSEHERLILLSPHKPEANDELVTYSLGKFGQRALDFYSIHVTRESNHPVKPLEQIGGNSCASGPVGKALSDACMGAVASFLTKYQDIILEHQKVIKKNEKRLANLKDIASANGLAFPKITLPPQPHTKEGIEAYNNVVAQIVIWVNLNLWQKLKIGRDEAKPLQRLKGFPSFPLVERQANEVDWWDMVCNVKKLINEKKEDGKVFWQNLAGYKRQEALLPYLSSEEDRKKGKKFARYQFGDLLLHLEKKHGEDWGKVYDEAWERIDKKVEGLSKHIKLEEERRSEDAQSKAALTDWLRAKASFVIEGLKEADKDEFCRCELKLQKWYGDLRGKPFAIEAENSILDISGFSKQYNCAFIWQKDGVKKLNLYLIINYFKGGKLRFKKIKPEAFEANRFYTVINKKSGEIVPMEVNFNFDDPNLIILPLAFGKRQGREFIWNDLLSLETGSLKLANGRVIEKTLYNRRTRQDEPALFVALTFERREVLDSSNIKPMNLIGIDRGENIPAVIALTDPEGCPLSRFKDSLGNPTHILRIGESYKEKQRTIQAAKEVEQRRAGGYSRKYASKAKNLADDMVRNTARDLLYYAVTQDAMLIFENLSRGFGRQGKRTFMAERQYTRMEDWLTAKLAYEGDPSKTYLSKTLAQYTSKTCSNCGFTITSADYDRVLEKLKKTATGWMTTINGKELKVEGQITYYNRYKRQNVVKDLSVELDRLSEESVNNDISSWTKGRSGEALSLLKKRFSHRPVQEKFVCLNCGFETHADEQAALNIARSWLFLRSQEYKKYQTNKTTGNTDKRAFVETWQSFYRKKLKEVWKPAV

SEQ ID NO: 275 - protein, 978 aa, synthetic construct
  REGION 1..978: note = CasX variant
MQEIKRINKIRRRLVKDSNTKKAGKTGPMKTLLVRVMTPDLRERLENLRKKPENIPQPISNTSRANLNKLLTDYTEMKKAILHVYWEEFQKDPVGLMSRVAQPAPKNIDQRKLIPVKDGNERLTSSGFACSQCCQPLYVYKLEQVNDKGKPHTNYFGRCNVSEHERLILLSPHKPEANDELVTYSLGKFGQRALDFYSIHVTRESNHPVKPLEQIGGNSCASGPVGKALSDACMGAVASFLTKYQDIILEHQKVIKKNEKRLANLKDIASANGLAFPKITLPPQPHTKEGIEAYNNVVAQIVIWVNLNLWQKLKIGRDEAKPLQRLKGFPSFPLVERQANEVDWWDMVCNVKKLINEKKEDGKVFWQNLAGYKRQEALLPYLSSEEDRKKGKKFARYQFGDLLLHLEKKHGEDWGKVYDEAWERIDKKVEGLSKHIKLEEERRSEDAQSKAALTDWLRAKASFVIEGLKEADKDEFCRCELKLQKWYGDLRGKPFAIEAENSILDISGFSKQYNCAFIWQKDGVKKLNLYLIINYFKGGKLRFKKIKPEAFEANRFYTVINKKSGEIVPMEVNFNFDDPNLIILPLAFGKRQGREFIWNDLLSLETGSLKLANGRVIEKTLYNRRTRQDEPALFVALTFERREVLDSSNIKPMNLIGIDRGENIPAVIALTDPEGCPLSRFKDSLGNPTHILRIGESYKEKQRTIQAAKEVEQRRAGGYSRKYASKAKNLADDMVRNTARDLLYYAVTQDAMLIFENLSRGFGRQGKRTFMAERQYTRMEDWLTAKLAYEFLPSKTYLSKTLAQYTSKTCSNCGFTITSADYDRVLEKLKKTATGWMTTINGKELKVEGQITYYNRYKRQNVVKDLSVELDRLSEESVNNDISSWTKGRSGEALSLLKKRFSHRPVQEKFVCLNCGFETHADEQAALNIARSWLFLRSQEYKKYQTNKTTGNTDKRAFVETWQSFYRKKLKEVWKPAV

SEQ ID NO: 276 - protein, 977 aa, synthetic construct
  REGION 1..977: note = CasX variant
MQEIKRINKIRRRLVKDSNTKKAGKTGPMKTLLVRVMTPDLRERLENLRKKPENIPQPISNTSRANLNKLLTDYTEMKKAILHVYWEEFQKDPVGLMSRVAQPAPKNIDQRKLIPVKDGNERLTSSGFACSQCCQPLYVYKLEQVNDKGKPHTNYFGRCNVSEHERLILLSPHKPEANDELVTYSLGKFGQRALDFYSIHVTRESNHPVKPLEQIGGNSCASGPVGKALSDACMGAVASFLTKYQDIILEHQKVIKKNEKRLANLKDIASANGLAFPKITLPPQPHTKEGIEAYNNVVAQIVIWVNLNLWQKLKIGRDEAKPLQRLKGFPSFPLVERQANEVDWWDMVCNVKKLINEKKEDGKVFWQNLAGYKRQEALLPYLSSEEDRKKGKKFARYQFGDLLLHLEKKHGEDWGKVYDEAWERIDKKVEGLSKHIKLEEERRSEDAQSKAALTDWLRAKASFVIEGLKEADKDEFCRCELKLQKWYGDLRGKPFAIEAENSILDISGFSKQYNCAFIWQKDGVKKLNLYLIINYFKGGKLRFKKIKPEAFEANRFYTVINKKSGEIVPMEVNFNFDDPNLIILPLAFGKRQGREFIWNDLLSLETGSLKLANGRVIEKTLYNRRTRQDEPALFVALTFERREVLDSSNIKPMNLIGIDRGENIPAVIALTDPEGCPLSRFKDSLGNPTHILRIGESYKEKQRTIQAKKEVEQRRAGGYSRKYASKAKNLADDMVRNTVRDLLYYAVTQDAMLIFENLSRGFGRQGKRTFMAERQYTRMEDWLTAKLAYEGLSKTYLSKTLAQYTSKTCSNCGFTITSADYDRVLEKLKKTATGWMTTINGKELKVEGQITYYNRYKRQNVVKDLSVELDRLSEESVNNDISSWTKGRSGEALSLLKKRFSHRPVQEKFVCLNCGFETHADEQAALNIARSWLFLRSQEYKKYQTNKTTGNTDKRAFVETWQSFYRKKLKEVWKPAV

SEQ ID NO: 277 - protein, 977 aa, synthetic construct
  REGION 1..977: note = CasX variant
MQEIKRINKIRRRLVKDSNTKKAGKTGPMKTLLVRVMTPDLRERLENLRKKPENIPQPISNTSRANLNKLLTDYTEMKKAILHVYWEEFQKDPVGLMSRVAQPAPKNIDQRKLIPVKDGNERLTSSGFACSQCCQPLYVYKLEQVNDKGKPHTNYFGRCNVSEHERLILLSPHKPEANDELVTYSLGKFGQRALDFYSIHVTRESNHPVKPLEQIGGNSCASGPVGKALSDACMGAVASFLTKYQDIILEHQKVIKKNEKRLANLKDIASANGLAFPKITLPPQPHTKEGIEAYNNVVAQIVIWVNLNLWQKLKIGRDEAKPLQRLKGFPSFPLVERQANEVDWWDMVCNVKKLINEKKEDGKVFWQNLAGYKRQEALRPYLSSEEDRKKGKKFARYQFGDLLLHLEKKHGEDWGKVYDEAWERIDKKVEGLSKHIKLEEERRSEDAQSKAALTDWLRAKASFVIEGLKEADKDEFCRCELKLQKWYGDLRGKPFAIEAENSILDISGFSKQYNCAFIWQKDGVKKLNLYLIINYFKGGKLRFKKIKPEAFEANRFYTVINKKSGEIVPMEVNFNFDDPNLIILPLAFGKRQGREFIWNDLLSLETGSLKLANGRVIEKTLYNRRTRQDEPALFVALTFERREVLDSSNIKPMNLIGIDRGENIPAVIALTDPEGCPLSRFKDSLGNPTHILRIGESYKEKQRTIQAKKEVEQRRAGGYSRKYASKAKNLADDMVRNTVRDLLYYAVTQDAMLIFENLSRGFGRQGKRTFMAERQYTRMEDWLTAKLAYEGLSKTYLSKTLAQYTSKTCSNCGFTITSADYDRVLEKLKKTATGWMTTINGKELKVEGQITYYNRYKRQNVVKDLSVELDRLSEESVNNDISSWTKGRSGEALSLLKKRFSHRPVQEKFVCLNCGFETHADEQAALNIARSWLFLRSQEYKKYQTNKTTGNTDKRAFVETWQSFYRKKLKEVWKPAV

SEQ ID NO: 278 - protein, 977 aa, synthetic construct
  REGION 1..977: note = CasX variant
MQEIKRINKIRRRLVKDSNTKKAGKTGPMKTLLVRVMTPDLRERLENLRKKPENIPQPISNTSRANLNKLLTDYTEMKKAILHVYWEEFQKDPVGLMSRVAQPAPKNIDQRKLIPVKDGNERLTSSGFACSQCCQPLYVYKLEQVNDKGKPHTNYFGRCNVSEHERLILLSPHKPEANDELVTYSLGKFGQRALDFYSIHVTRESNHPVKPLEQIGGNSCASGPVGKALSDACMGAVASFLTKYQDIILEHQKVIKKNEKRLANLKDIASANGLAFPKITLPPQPHTKEGIEAYNNVVAQIVIWVNLNLWQKLKIGRDEAKPLQRLKGFPSFPLVERQANEVDWWDMVCNVKKLINEKKEDGKVFWQNLAGYKRQEALLPYLSSEEDRKKGKKFARYQFGDLLLHLEKKHGEDWGKVYDEAWERIDKKVEGLSKHIKLEEERRSEDAQSKAALTDWLRAKASFVIEGLKEADKDEFKRCELKLQKWYGDLRGKPFAIEAENSILDISGFSKQYNCAFIWQKDGVKKLNLYLIINYFKGGKLRFKKIKPEAFEANRFYTVINKKSGEIVPMEVNFNFDDPNLIILPLAFGKRQGREFIWNDLLSLETGSLKLANGRVIEKTLYNRRTRQDEPALFVALTFERREVLDSSNIKPMNLIGIDRGENIPAVIALTDPEGCPLSRFKDSLGNPTHILRIGESYKEKQRTIQAKKEVEQRRAGGYSRKYASKAKNLADDMVRNTARDLLYYAVTQDAMLIFENLSRGFGRQGKRTFMAERQYTRMEDWLTAKLAYEGLSKTYLSKTLAQYTSKTCSNCGFTITSADYDRVLEKLKKTATGWMTTINGKELKVEGQITYYNRYKRQNVVKDLSVELDRLSEESVNNDISSWTKGRSGEALSLLKKRFSHRPVQEKFVCLNCGFETHADEQAALNIARSWLFLRSQEYKKYQTNKTTGNTDKRAFVETWQSFYRKKLKEVWKPAV

SEQ ID NO: 279 - protein, 978 aa, synthetic construct
  REGION 1..978: note = CasX variant
MQEIKRINKIRRRLVKDSNTKKAGKTGPMKTLLVRVMTPDLRERLENLRKKPENIPQPISNTSRANLNKLLTDYTEMKKAILHVYWEEFQKDPVGLMSRVAQPAPKNIDQRKLIPVKDGNERLTSSGFACSQCCQPLYVYKLEQVNDKGKPHTNYFGRCNVSEHERLILLSPHKPEANDELVTYSLGKFGQRALDFYSIHVTRESNHPVKPLEQIGGNSCASGPVGKALSDACMGAVASFLTKYQDIIIEHQKVIKKNEKRLANLKDIASANGLAFPKITLPPQPHTKEGIEAYNNVVAQIVIWVNLNLWQKLKIGRDEAKPLQRLKGFPSFPLVERQANEVDWWDMVCNVKKLINEKKEDGKVFWQNLAGYKRQEALLPYLSSEEDRKKGKKFARYQFGDLLLHLEKKHGEDWGKVYDEAWERIDKKVEGLSKHIKLEEERRSEDAQSKAALTDWLRAKASFVIEGLKEADKDEFCRCELKLQKWYGDLRGKPFAIEAENSILDISGFSKQYNCAFIWQKDGVKKLNLYLIINYFKGGKLRFKKIKPEAFEANRFYTVINKKSGEIVPMEVNFNFDDPNLIILPLAFGKRQGREFIWNDLLSLETGSLKLANGRVIEKTLYNRRTRQDEPALFVALTFERREVLDSSNIKPMNLIGIDRGENIPAVIALTDPEGCPLSRFKDSLGNPTHILRIGESYKEKQRTIQAAKEVEQRRAGGYSRKYASKAKNLADDMVRNTARDLLYYAVTQDAMLIFENLSRGFGRQGKRTFNAERQYTRMEDWLTAKLAYEGLPSKTYLSKTLAQYTSKTCSNCGFTITSADYDRVLEKLKKTATGWMTTINGKELKVEGQITYYNRYKRQNVVKDLSVELDRLSEESVNNDISSWTKGRSGEALSLLKKRFSHRPVQEKFVCLNCGFETHADEQAALNIARSWLFLRSQEYKKYQTNKTTGNTDKRAFVETWQSFYRKKLKEVWKPAV

SEQ ID NO: 280 - protein, 978 aa, synthetic construct
  REGION 1..978: note = CasX variant
MQEIKRINKIRRRLVKDSNTKKAGKTGPMKTLLVRVMTPDLRERLENLRKKPENIPQPISNTSRANLNKLLTDYTEMKKAILHVYWEEFQKDPVGLMSRVAQPAPKNIDQRKLIPVKDGNERLTSSGFACSQCCQPLYVYKLEQVNDKGKPHTNYFGRCNVSEHERLILLSPHKPEANDELVTYSLGKFGQRALDFYSIHVTRESNHPVKPLEQIGGNSCASGPVGKALSDACMGAVASFLTKYQDIILEHQKVIKKNEKRLANLKDIASANGLAFPKITLPPQPHTKEGIEAYNNVVAQIVIWVNLNLWQKLKIGRDEAKPLQRLKGFPSFPLVERQANEVDWWDMVCNVKKLINEKKEDGKVFWQNLAGYKRQEALLPYLSSEEDRKKGKKFARYQFGDLLLHLEKKHGEDWGKVYDEAWERIDKKVEGLSKHIKLEEERRSEDAQSKAALTDWLRAKASFVIEGLKEADKDEFCRCELKLQKWYGDLRGKPFAIEAENSILDISGFSKQYNCAFIWQKDGVKKLNLYLIINYFKGGKLRFKKIKPEAFEANRFYTVINKKSGEIVPMEVNFNFDDPNLIILPLAFGKRQGREFIWNDLLSLETGSLKLANGRVIEKTLYNRRTRQDEPALFVALTFERREVLDSSNIKPMNLIGIDRGENIPAVIALTDPEGCPLSRFKDSLGNPTHILRIGESYKEKQRTIQAAKEVEQRRAGGYSRKYASKAKNLADDMVRNTARDLLYYAKTQDAMLIFENLSRGFGRQGKRTFMAERQYTRMEDWLTAKLAYEGLPSKTYLSKTLAQYTSKTCSNCGFTITSADYDRVLEKLKKTATGWMTTINGKELKVEGQITYYNRYKRQNVVKDLSVELDRLSEESVNNDISSWTKGRSGEALSLLKKRFSHRPVQEKFVCLNCGFETHADEQAALNIARSWLFLRSQEYKKYQTNKTTGNTDKRAFVETWQSFYRKKLKEVWKPAV

SEQ ID NO: 281 - protein, 977 aa, synthetic construct
  REGION 1..977: note = CasX variant
MQEIKRINKIRRRLVKDSNTKKAGKTGPMKTLLVRVMTPDLRERLENLRKKPENIPQPISNTSRANLNKLLTDYTEMKKAILHVYWEEFQKDPVGLMSRVAQPAPKNIDQRKLIPVKDGNERLTSSGFACSQCCQPLYVYKLEQVNDKGKPHTNYFGRCNVSEHERLILLSPHKPEANDELVTYSLGKFGQRALDFYSIHVTRESNHPVKPLEQIGGNSCASGPVGKALSDACMGAVASFLTKYQDIILEHQKVIKKNEKRLANLKDIASANGLAFPKITLPPQPHTKEGIEAYNNVVAQIVIWVNLNLWQKLKIGRDEAKPLQRLKGFPSFPLVERQANEVDWWDMVCNVKKLINEKKEDGKVFWQNLAGYKRQEALRPYLSSEEDRKKGKKFARYQFGDLLLHLEKKHGEDWGKVYDEAWERIDKKVEGLSKHIKLEEERRSEDAQSKAALTDWLRAKASFVIEGLKEADKDEFKRCELKLQKWYGDLRGKPFAIEAENSILDISGFSKQYNCAFIWQKDGVKKLNLYLIINYFKGGKLRFKKIKPEAFEANRFYTVINKKSGEIVPMEVNFNFDDPNLIILPLAFGKRQGREFIWNDLLSLETGSLKLANGRVIEKTLYNRRTRQDEPALFVALTFERREVLDSSNIKPMNLIGIDRGENIPAVIALTDPEGCPLSRFKDSLGNPTHILRIGESYKEKQRTIQAKKEVEQRRAGGYSRKYASKAKNLADDMVRNTARDLLYYAVTQDAMLIFENLSRGFGRQGKRTFMAERQYTRNEDWLTAKLAYEGLSKTYLSKTLAQYTSKTCSNCGFTITSADYDRVLEKLKKTATGWMTTINGKELKVEGQITYYNRYKRQNVVKDLSVELDRLSEESVNNDISSWTKGRSGEALSLLKKRFSHRPVQEKFVCLNCGFETHADEQAALNIARSWLFLRSQEYKKYQTNKTTGNTDKRAFVETWQSFYRKKLKEVWKPAV

SEQ ID NO: 282 - protein, 978 aa, synthetic construct
  REGION 1..978: note = CasX variant
MQEIKRINKIRRRLVKDSNTKKAGKTGPMKTLLVRVMTPDLRERLENLRKKPENIPQPISNTSRANLNKLLTDYTEMKKAILHVYWEEFQKDPVGLMSRVAQPAPKNIDQRKLIPVKDGNERLTSSGFACSQCCQPLYVYKLEQVNDKGKPHTNYFGRCNVSEHERLILLSPHKPEANDELVTYSLGKFGQRALDFYSIHVTRESNHPVKPLEQIGGNSCASGPVGKALSDACMGAVASFLTKYQDIILEHQKVIKKNEKRLANLKDIASANGLAFPKITLPPQPHTKEGIEAYNNVVAQIVIWVNLNLWQKLKIGRDEAKPLQRLKGFPSFPLVERQANEVDWWDMVCNVKKLINEKKEDGKVFWQNLAGYKRQEALLPYLSSEEDRKKGKKFARYQFGDLLLHLEKKHGEDWGKVYDEAWERIDKKVEGLSKHIKLEEERRSEDAQSKAALTDWLRAKASFVIEGLKEADKDEFCRCELKLQKWYGDLRGKPFAIEAENSILDISGFSKQYNCAFIWQKDGVKKLNLYLIINYFKGGKLRFKKIKPEAFEANRFYTVINKKSGEIVPMEVNFNFDDPNLIILPLAFGKRQGREFIWNDLLSLETGSLKLANGRVIEKTLYNRRTRQDEPALFVALTFERREVLDSSNIKPMNLIGIDRGENIPAVIALTDPEGCPLSRFKDSLGNPTHILRIGESYKEKQRTIQAAKEVEQRRAGGYSRKYASKAKNLADDMVRNTARDLLYYAVTQDAMLIMENLSRGFGRQGKRTFMAERQYTRMEDWLTAKLAYEGLPSKTYLSKTLAQYTSKTCSNCGFTITSADYDRVLEKLKKTATGWMTTINGKELKVEGQITYYNRYKRQNVVKDLSVELDRLSEESVNNDISSWTKGRSGEALSLLKKRFSHRPVQEKFVCLNCGFETHADEQAALNIARSWLFLRSQEYKKYQTNKTTGNTDKRAFVETWQSFYRKKLKEVWKPAV

SEQ ID NO: 283 - protein, 977 aa, synthetic construct
  REGION 1..977: note = CasX variant
MQEIKRINKIRRRLVKDSNTKKAGKTGPMKTLLVRVMTPDLRERLENLRKKPENIPQPISNTSRANLNKLLTDYTEMKKAILHVYWEEFQKDPVGLMSRVAQPAPKNIDQRKLIPVKDGNERLTSSGFACSQCCQPLYVYKLEQVNDKGKPHTNYFGRCNVSEHERLILLSPHKPEANDELVTYSLGKFGQRALDFYSIHVTRESNHPVKPLEQIGGNSCASGPVGKALSDACMGAVASFLTKYQDIILEHQKVIKKNEKRLANLKDIASANGLAFPKITLPPQPHTKEGIEAYNNVVAQIVIWVNLNLWQKLKIGRDEAKPLQRLKGFPSFPLVERQANEVDWWDMVCNVKKLINEKKEDGKVFWQNLAGYKRQEALRPYLSSEEDRKKGKKFARYQFGDLLLHLEKKHGEDWGKVYDEAWERIDKKVEGLSKHIKLEEERRSEDAQSKAALTDWLRAKASFVIEGLKEADKDEFCRCELKLQKWYGDLRGKPFAIEAENSILDISGFSKQYNCAFIWQKDGVKKLNLYLIINYFKGGKLRFKKIKPEAFEANRFYTVINKKSGEIVPMEVNFNFDDPNLIILPLAFGKRQGREFIWNDLLSLETGSLKLANGRVIEKTLYNRRTRQDEPALFVALTFERREVLDSSNIKPMNLIGIDRGENIPAVIALTDPEGCPLSRFKDSLGNPTHILRIGESYKEKQRTIQAKKEVEQRRAGGYSRKYASKAKNLADDMVRNTARDLLYYAVTQDAMLIFENLSRGFGRQGKRTFMAERQYTRMEDWLTAKLAYEGLSKTYLSKTLAQYTSKTCSNCGFTITSADYDRVLEKLKKTATGWMTTINGKELKVEGQITYYNRRKRQNVVKDLSVELDRLSEESVNNDISSWTKGRSGEALSLLKKRFSHRPVQEKFVCLNCGFETHADEQAALNIARSWLFLRSQEYKKYQTNKTTGNTDKRAFVETWQSFYRKKLKEVWKPAV

SEQ ID NO: 284 - protein, 977 aa, synthetic construct
  REGION 1..977: note = CasX variant
MQEIKRINKIRRRLVKDSNTKKAGKTGPMKTLLVRVMTPDLRERLENLRKKPENIPQPISNTSRANLNKLLTDYTEMKKAILHVYWEEFQKDPVGLMSRVAQPAPKNIDQRKLIPVKDGNERLTSSGFACSQCCQPLYVYKLEQVNDKGKPHTNYFGRCNVSEHERLILLSPHKPEANDELVTYSLGKFGQRALDFYSIHVTRESNHPVKPLEQIGGNSCASGPVGKALSDACMGAVASFLTKYQDIILEHQKVIKKNEKRLANLKDIASANGLAFPKITLPPQPHTKEGIEAYNNVVAQIVIWVNLNLWQKLKIGRDEAKPLQRLKGFPSFPLVERQANEVDWWDMVCNVKKLINEKKEDGKVFWQNLAGYKRQEALRPYLSSEEDRKKGKKFARYQFGDLLLHLEKKHGEDWGKVYDEAWERIDKKVEGLSKHIKLEEERRSEDAQSKAALTDWLRAKASFVIEGLKEADKDEFCRCELKLQKWYGDLRGKPFAIEAENSILDISGFSKQYNCAFIWQKDGVKKLNLYLIINYFKGGKLRFKKIKPEAFEANRFYTVINKKSGEIVPMEVNFNFDDPNLIILPLAFGKRQGREFIWNDLLSLETGSLKLANGRVIEKTLYNRRTRQDEPALFVALTFERREVLDSSNIKPMNLIGVDRGENIPAVIALTDPEGCPLSRFKDSLGNPTHILRIGESYKEKQRTIQAKKEVEQRRAGGYSRKYASKAKNLADDMVRNTARDLLYYAVTQDAMLIFENLSRGFGRQGKRTFMAERQYTRMEDWLTAKLAYEGLSKTYLSKTLAQYTSKTCSNCGFTITSADYDRVLEKLKKTATGWMTTINGKELKVEGQITYYNRRKRQNVVKDLSVELDRLSEESVNNDISSWTKGRSGEALSLLKKRFSHRPVQEKFVCLNCGFETHADEQAALNIARSWLFLRSQEYKKYQTNKTTGNTDKRAFVETWQSFYRKKLKEVWKPAV

SEQ ID NO: 285 - protein, 977 aa, synthetic construct
  REGION 1..977: note = CasX variant
MQEIKRINKIRRRLVKDSNTKKAGKTGPMKTLLVRVMTPDLRERLENLRKKPENIPQPISNTSRANLNKLLTDYTEMKKAILHVYWEEFQKDPVGLMSRVAQPAPKNIDQRKLIPVKDGNERLTSSGFACSQCCQPLYVYKLEQVNDKGKPHTNYFGRCNVSEHERLILLSPHKPEANDELVTYSLGKFGQRALDFYSIHVTRESNHPVKPLEQIGGNSCASGPVGKALSDACMGAVASFLTKYQDIILEHQKVIKKNEKRLANLKDIASANGLAFPKITLPPQPHTKEGIEAYNNVVAQIVIWVNLNLWQKLKIGRDEAKPLQRLKGFPSFPLVERQANEVDWWDMVCNVKKLINEKKEDGKVFWQNLAGYKRQEALRPYLSSENDRKKGKKFARYQFGDLLLHLEKKHGEDWGKVYDEAWERIDKKVEGLSKHIKLEEERRSEDAQSKAALTDWLRAKASFVIEGLKEADKDEFCRCELKLQKWYGDLRGKPFAIEAENSILDISGFSKQYNCAFIWQKDGVKKLNLYLIINYFKGGKLRFKKIKPEAFEANRFYTVINKKSGEIVPMEVNFNFDDPNLIILPLAFGKRQGREFIWNDLLSLETGSLKLANGRVIEKTLYNRRTRQDEPALFVALTFERREVLDSSNIKPMNLIGVDRGENIPAVIALTDPEGCPLSRFKDSLGNPTHILRIGESYKEKQRTIQAKKEVEQRRAGGYSRKYASKAKNLADDMVRNTARDLLYYAVTQDAMLIFENLSRGFGRQGKRTFMAERQYTRMEDWLTAKLAYEGLSKTYLSKTLAQYTSKTCSNCGFTITSADYDRVLEKLKKTATGWMTTINGKELKVEGQITYYNRRKRQNVVKDLSVELDRLSEESVNNDISSWTKGRSGEALSLLKKRFSHRPVQEKFVCLNCGFETHADEQAALNIARSWLFLRSQEYKKYQTNKTTGNTDKRAFVETWQSFYRKKLKEVWKPAV

SEQ ID NO: 286 - protein, 977 aa, synthetic construct
  REGION 1..977: note = CasX variant
MQEIKRINKIRRRLVKDSNTKKAGKTGPMKTLLVRVMTPDLRERLENLRKKPENIPQPISNTSRANLNKLLTDYTEMKKAILHVYWEEFQKDPVGLMSRVAQPAPKNIDQRKLIPVKDGNERLTSSGFACSQCCQPLYVYKLEQVNDKGKPHTNYFGRCNVSEHERLILLSPHKPEANDELVTYSLGKFGQRALDFYSIHVTRESNHPVKPLEQIGGNSCASGPVGKALSDACMGAVASFLTKYQDIILEHQKVIKKNEKRLANLKDIASANGLAFPKITLPPQPHTKEGIEAYNNVVAQIVIWVNLNLWQKLKIGRDEAKPLQRLKGFPSFPLVERQANEVDWWDMVCNVKKLINEKKEDGKVFWQNLAGYKRQEALRPYLSSEEDRKKGKKFARYQFGDLLKHLEKKHGEDWGKVYDEAWERIDKKVEGLSKHIKLEEERRSEDAQSKAALTDWLRAKASFVIEGLKEADKDEFCRCELKLQKWYGDLRGKPFAIEAENSILDISGFSKQYNCAFIWQKDGVKKLNLYLIINYFKGGKLRFKKIKPEAFEANRFYTVINKKSGEIVPMEVNFNFDDPNLIILPLAFGKRQGREFIWNDLLSLETGSLKLANGRVIEKTLYNRRTRQDEPALFVALTFERREVLDSSNIKPMNLIGVDRGENIPAVIALTDPEGCPLSRFKDSLGNPTHILRIGESYKEKQRTIQAKKEVEQRRAGGYSRKYASKAKNLADDMVRNTARDLLYYAVTQDAMLIFENLSRGFGRQGKRTFMAERQYTRMEDWLTAKLAYEGLSKTYLSKTLAQYTSKTCSNCGFTITSADYDRVLEKLKKTATGWMTTINGKELKVEGQITYYNRRKRQNVVKDLSVELDRLSEESVNNDISSWTKGRSGEALSLLKKRFSHRPVQEKFVCLNCGFETHADEQAALNIARSWLFLRSQEYKKYQTNKTTGNTDKRAFVETWQSFYRKKLKEVWKPAV

SEQ ID NO: 287 - protein, 978 aa, synthetic construct
  REGION 1..978: note = CasX variant
MQEIKRINKIRRRLVKDSNTKKAGKTGPMKTLLVRVMTPDLRERLENLRKKPENIPQPISNTSRANLNKLLTDYTEMKKAILHVYWEEFQKDPVGLMSRVAQPAPKNIDQRKLIPVKDGNERLTSSGFACSQCCQPLYVYKLEQVNDKGKPHTNYFGRCNVSEHERLILLSPHKPEANDELVTYSLGKFGQVRALDFYSIHVTRESNHPVKPLEQIGGNSCASGPVGKALSDACMGAVASFLTKYQDIILEHQKVIKKNEKRLANLKDIASANGLAFPKITLPPQPHTKEGIEAYNNVVAQIVIWVNLNLWQKLKIGRDEAKPLQRLKGFPSFPLVERQANEVDWWDMVCNVKKLINEKKEDGKVFWQNLAGYKRQEALRPYLSSEEDRKKGKKFARYQFGDLLLHLEKKHGEDWGKVYDEAWERIDKKVEGLSKHIKLEEERRSEDAQSKAALTDWLRAKASFVIEGLKEADKDEFCRCELKLQKWYGDLRGKPFAIEAENSILDISGFSKQYNCAFIWQKDGVKKLNLYLIINYFKGGKLRFKKIKPEAFEANRFYTVINKKSGEIVPMEVNFNFDDPNLIILPLAFGKRQGREFIWNDLLSLETGSLKLANGRVIEKTLYNRRTRQDEPALFVALTFERREVLDSSNIKPMNLIGVDRGENIPAVIALTDPEGCPLSRFKDSLGNPTHILRIGESYKEKQRTIQAKKEVEQRRAGGYSRKYASKAKNLADDMVRNTARDLLYYAVTQDAMLIFENLSRGFGRQGKRTFMAERQYTRMEDWLTAKLAYEGLSKTYLSKTLAQYTSKTCSNCGFTITSADYDRVLEKLKKTATGWMTTINGKELKVEGQITYYNRRKRQNVVKDLSVELDRLSEESVNNDISSWTKGRSGEALSLLKKRFSHRPVQEKFVCLNCGFETHADEQAALNIARSWLFLRSQEYKKYQTNKTTGNTDKRAFVETWQSFYRKKLKEVWKPAV

SEQ ID NO: 288 - protein, 977 aa, synthetic construct
  REGION 1..977: note = CasX variant
MQEIKRINKIRRRLVKDSNTKKAGKTGPMKTLLVRVMTPDLRERLENLRKKPENIPQPISNTSRANLNKLLTDYTEMKKAILHVYWEEFQKDPVGLMSRVAQPAPKNIDQRKLIPVKDGNERLTSSGFACSQCCQPLYVYKLEQVNDKGKPHTNYFGRCNVSEHERLILLSPHKPEANDELVTYSLGKFGQRALDFYSIHVTRESNHPVKPLEQIGGNSCASGPVGKALSDACMGAVASFLTKYQDIILEHQKVIKKNEKRLANLKDIASANGLAFPKITLPPQPHTKEGIEAYNNVVAQIVIWVNLNLWQKLKIGRDEAKPLQRLKGFPSFPLVERQANEVDWWDMVCNVKKLINEKKEDGKVFWQNLAGYKRQEALRPYLSSENDRKKGKKFARYQFGDLLKHLEKKHGEDWGKVYDEAWERIDKKVEGLSKHIKLEEERRSEDAQSKAALTDWLRAKASFVIEGLKEADKDEFCRCELKLQKWYGDLRGKPFAIEAENSILDISGFSKQYNCAFIWQKDGVKKLNLYLIINYFKGGKLRFKKIKPEAFEANRFYTVINKKSGEIVPMEVNFNFDDPNLIILPLAFGKRQGREFIWNDLLSLETGSLKLANGRVIEKTLYNRRTRQDEPALFVALTFERREVLDSSNIKPMNLIGVDRGENIPAVIALTDPEGCPLSRFKDSLGNPTHILRIGESYKEKQRTIQAKKEVEQRRAGGYSRKYASKAKNLADDMVRNTARDLLYYAVTQDAMLIFENLSRGFGRQGKRTFMAERQYTRMEDWLTAKLAYEGLSKTYLSKTLAQYTSKTCSNCGFTITSADYDRVLEKLKKTATGWMTTINGKELKVEGQITYYNRRKRQNVVKDLSVELDRLSEESVNNDISSWTKGRSGEALSLLKKRFSHRPVQEKFVCLNCGFETHADEQAALNIARSWLFLRSQEYKKYQTNKTTGNTDKRAFVETWQSFYRKKLKEVWKPAV

SEQ ID NO: 289 - protein, 977 aa, synthetic construct
  REGION 1..977: note = CasX variant
MQEIKRINKIRRRLVKDSNTKKAGKTGPMKTLLVRVMTPDLRERLENLRKKPENIPQPISNTSRANLNKLLTDYTEMKKAILHVYWEEFQKDPVGLMSRVAQPAPKNIDQRKLIPVKDGNERLTSSGFACSQCCQPLYVYKLEQVNDKGKPHTNYFGRCNVSEHERLILLSPHKPEANDELVTYSLGKFGQRALDFYSIHVTRESNHPVKPLEQIGGNSCASGPVGKALSDACMGAVASFLTKYQDIILEHQKVIKKNEKRLANLKDIASANGLAFPKITLPPQPHTKEGIEAYNNVVAQIVIWVNLNLWQKLKIGRDEAKPLQRLKGFPSFPLVERQANEVDWWDMVCNVKKLINEKKEDGKVFWQNLAGYKRQEALRPYLSSEEDRKKGKKFARYQLGDLLLHLEKKHGEDWGKVYDEAWERIDKKVEGLSKHIKLEEERRSEDAQSKAALTDWLRAKASFVIEGLKEADKDEFCRCELKLQKWYGDLRGKPFAIEAENSILDISGFSKQYNCAFIWQKDGVKKLNLYLIINYFKGGKLRFKKIKPEAFEANRFYTVINKKSGEIVPMEVNFNFDDPNLIILPLAFGKRQGREFIWNDLLSLETGSLKLANGRVIEKTLYNRRTRQDEPALFVALTFERREVLDSSNIKPMNLIGVDRGENIPAVIALTDPEGCPLSRFKDSLGNPTHILRIGESYKEKQRTIQAKKEVEQRRAGGYSRKYASKAKNLADDMVRNTARDLLYYAVTQDAMLIFENLSRGFGRQGKRTFMAERQYTRMEDWLTAKLAYEGLSKTYLSKTLAQYTSKTCSNCGFTITSADYDRVLEKLKKTATGWMTTINGKELKVEGQITYYNRRKRQNVVKDLSVELDRLSEESVNNDISSWTKGRSGEALSLLKKRFSHRPVQEKFVCLNCGFETHADEQAALNIARSWLFLRSQEYKKYQTNKTTGNTDKRAFVETWQSFYRKKLKEVWKPAV

SEQ ID NO: 290 - protein, 977 aa, synthetic construct
  REGION 1..977: note = CasX variant
MQEIKRINKIRRRLVKDSNTKKAGKTGPMKTLLVRVMTPDLRERLENLRKKPENIPQPISNTSRANLNKLLTDYTEMKKAILHVYWEEFQKDPVGLMSRVAQPAPKNIDQRKLIPVKDGNERLTSSGFACSQCCQPLYVYKLEQVNDKGKPHTNYFGRCNVSEHERLILLSPHKPEANDELVTYSLGKFGQRALDFYSIHVTRESNHPVKPLEQIGGNSCASGPVGKALSDACMGAVASFLTKYQDIILEHQKVIKKNEKRLANLKDIASANGLAFPKITLPPQPHTKEGIEAYNNVVAQIVIWVNLNLWQKLKIGRDEAKPLQRLKGFPSFPLVERQANEVDWWDMVCNVKKLINEKKEDGKVFWQNLAGYKRQEALRPYLSSENDRKKGKKFARYQLGDLLLHLEKKHGEDWGKVYDEAWERIDKKVEGLSKHIKLEEERRSEDAQSKAALTDWLRAKASFVIEGLKEADKDEFCRCELKLQKWYGDLRGKPFAIEAENSILDISGFSKQYNCAFIWQKDGVKKLNLYLIINYFKGGKLRFKKIKPEAFEANRFYTVINKKSGEIVPMEVNFNFDDPNLIILPLAFGKRQGREFIWNDLLSLETGSLKLANGRVIEKTLYNRRTRQDEPALFVALTFERREVLDSSNIKPMNLIGVDRGENIPAVIALTDPEGCPLSRFKDSLGNPTHILRIGESYKEKQRTIQAKKEVEQRRAGGYSRKYASKAKNLADDMVRNTARDLLYYAVTQDAMLIFENLSRGFGRQGKRTFMAERQYTRMEDWLTAKLAYEGLSKTYLSKTLAQYTSKTCSNCGFTITSADYDRVLEKLKKTATGWMTTINGKELKVEGQITYYNRRKRQNVVKDLSVELDRLSEESVNNDISSWTKGRSGEALSLLKKRFSHRPVQEKFVCLNCGFETHADEQAALNIARSWLFLRSQEYKKYQTNKTTGNTDKRAFVETWQSFYRKKLKEVWKPAV

SEQ ID NO: 291 - protein, 977 aa, synthetic construct
  REGION 1..977: note = CasX variant
MQEIKRINKIRRRLVKDSNTKKAGKTGPMKTLLVRVMTPDLRERLENLRKKPENIPQPISNTSRANLNKLLTDYTEMKKAILHVYWEEFQKDPVGLMSRVAQPAPKNIDQRKLIPVKDGNERLTSSGFACSQCCQPLYVYKLEQVNDKGKPHTNYFGRCNVSEHERLILLSPHKPEANDELVTYSLGKFGQRALDFYSIHVTRESNHPVKPLEQIGGNSCASGPVGKALSDACMGAVASFLTKYQDIILEHQKVIKKNEKRLANLKDIASANGLAFPKITLPPQPHTKEGIEAYNNVVAQIVIWVNLNLWQKLKIGRDEAKPLQRLKGFPSFPLVERQANEVDWWDMVCNVKKLINEKKEDGKVFWQNLAGYKRQEALRPYLSSEEDRKKGKKFARYQLGDLLLHLEKKHGEDWGKVYDEAWERIDKKVEGLSKHIKLEEERRSEDAQSKAALTDWLRAKASFVIEGLKEADKDEFSRCELKLQKWYGDLRGKPFAIEAENSILDISGFSKQYNCAFIWQKDGVKKLNLYLIINYFKGGKLRFKKIKPEAFEANRFYTVINKKSGEIVPMEVNFNFDDPNLIILPLAFGKRQGREFIWNDLLSLETGSLKLANGRVIEKTLYNRRTRQDEPALFVALTFERREVLDSSNIKPMNLIGVDRGENIPAVIALTDPEGCPLSRFKDSLGNPTHILRIGESYKEKQRTIQAKKEVEQRRAGGYSRKYASKAKNLADDMVRNTARDLLYYAVTQDAMLIFENLSRGFGRQGKRTFMAERQYTRMEDWLTAKLAYEGLSKTYLSKTLAQYTSKTCSNCGFTITSADYDRVLEKLKKTATGWMTTINGKELKVEGQITYYNRRKRQNVVKDLSVELDRLSEESVNNDISSWTKGRSGEALSLLKKRFSHRPVQEKFVCLNCGFETHADEQAALNIARSWLFLRSQEYKKYQTNKTTGNTDKRAFVETWQSFYRKKLKEVWKPAV

SEQ ID NO: 292 - protein, 977 aa, synthetic construct
  REGION 1..977: note = CasX variant
MQEIKRINKIRRRLVKDSNTKKAGKTGPMKTLLVRVMTPDLRERLENLRKKPENIPQPISNTSRANLNKLLTDYTEMKKAILHVYWEEFQKDPVGLMSRVAQPAPKNIDQRKLIPVKDGNERLTSSGFACSQCCQPLYVYKLEQVNDKGKPHTNYFGRCNVSEHERLILLSPHKPEANDELVTYSLGKFGQRALDFYSIHVTRESNHPVKPLEQIGGNSCASGPVGKALSDACMGAVASFLTKYQDIILEHQKVIKKNEKRLANLKDIASANGLAFPKITLPPQPHTKEGIEAYNNVVAQIVIWVNLNLWQKLKIGRDEAKPLQRLKGFPSFPLVERQANEVDWWDMVCNVKKLINEKKEDGKVFWQNLAGYKRQEALRPYLSSEEDRKKGKKFARYQLGDLLKHLEKKHGEDWGKVYDEAWERIDKKVEGLSKHIKLEEERRSEDAQSKAALTDWLRAKASFVIEGLKEADKDEFCRCELKLQKWYGDLRGKPFAIEAENSILDISGFSKQYNCAFIWQKDGVKKLNLYLIINYFKGGKLRFKKIKPEAFEANRFYTVINKKSGEIVPMEVNFNFDDPNLIILPLAFGKRQGREFIWNDLLSLETGSLKLANGRVIEKTLYNRRTRQDEPALFVALTFERREVLDSSNIKPMNLIGVDRGENIPAVIALTDPEGCPLSRFKDSLGNPTHILRIGESYKEKQRTIQAKKEVEQRRAGGYSRKYASKAKNLADDMVRNTARDLLYYAVTQDAMLIFENLSRGFGRQGKRTFMAERQYTRMEDWLTAKLAYEGLSKTYLSKTLAQYTSKTCSNCGFTITSADYDRVLEKLKKTATGWMTTINGKELKVEGQITYYNRRKRQNVVKDLSVELDRLSEESVNNDISSWTKGRSGEALSLLKKRFSHRPVQEKFVCLNCGFETHADEQAALNIARSWLFLRSQEYKKYQTNKTTGNTDKRAFVETWQSFYRKKLKEVWKPAV

SEQ ID NO: 293 - protein, 977 aa, synthetic construct
  REGION 1..977: note = CasX variant
MQEIKRINKIRRRLVKDSNTKKAGKTGPMKTLLVRVMTPDLRERLENLRKKPENIPQPISNTSRANLNKLLTDYTEMKKAILHVYWEEFQKDPVGLMSRVAQPAPKNIDQRKLIPVKDGNERLTSSGFACSQCCQPLYVYKLEQVNDKGKPHTNYFGRCNVSEHERLILLSPHKPEANDELVTYSLGKFGQRALDFYSIHVTRESNHPVKPLEQIGGNSCASGPVGKALSDACMGAVASFLTKYQDIILEHQKVIKKNEKRLANLKDIASANGLAFPKITLPPQPHTKEGIEAYNNVVAQIVIWVNLNLWQKLKIGRDEAKPLQRLKGFPSFPLVERQANEVDWWDMVCNVKKLINEKKEDGKVFWQNLAGYKRQEALRPYLSSENDRKKGKKFARYQLGDLLKHLEKKHGEDWGKVYDEAWERIDKKVEGLSKHIKLEEERRSEDAQSKAALTDWLRAKASFVIEGLKEADKDEFSRCELKLQKWYGDLRGKPFAIEAENSILDISGFSKQYNCAFIWQKDGVKKLNLYLIINYFKGGKLRFKKIKPEAFEANRFYTVINKKSGEIVPMEVNFNFDDPNLIILPLAFGKRQGREFIWNDLLSLETGSLKLANGRVIEKTLYNRRTRQDEPALFVALTFERREVLDSSNIKPMNLIGVDRGENIPAVIALTDPEGCPLSRFKDSLGNPTHILRIGESYKEKQRTIQAKKEVEQRRAGGYSRKYASKAKNLADDMVRNTARDLLYYAVTQDAMLIFENLSRGFGRQGKRTFMAERQYTRMEDWLTAKLAYEGLSKTYLSKTLAQYTSKTCSNCGFTITSADYDRVLEKLKKTATGWMTTINGKELKVEGQITYYNRRKRQNVVKDLSVELDRLSEESVNNDISSWTKGRSGEALSLLKKRFSHRPVQEKFVCLNCGFETHADEQAALNIARSWLFLRSQEYKKYQTNKTTGNTDKRAFVETWQSFYRKKLKEVWKPAV

SEQ ID NO: 294 - protein, 977 aa, synthetic construct
  REGION 1..977: note = CasX variant
MQEIKRINKIRRRLVKDSNTKKAGKTGPMKTLLVRVMTPDLRERLENLRKKPENIPQPISNTSRANLNKLLTDYTEMKKAILHVYWEEFQKDPVGLMSRVAQPAPKNIDQRKLIPVKDGNERLTSSGFACSQCCQPLYVYKLEQVNDKGKPHTNYFGRCNVSEHERLILLSPHKPEANDELVTYSLGKFGQRALDFYSIHVTRESNHPVKPLEQIGGNSCASGPVGKALSDACMGAVASFLTKYQDIILEHQKVIKKNEKRLANLKDIASANGLAFPKITLPPQPHTKEGIEAYNNVVAQIVIWVNLNLWQKLKIGRDEAKPLQRLKGFPSFPLVERQANEVDWWDMVCNVKKLINEKKEDGKVFWQNLAGYKRQEALRPYLSSEEDRKKGKKFARYQLGDLLLHLEKKHGEDWGKVYDEAWERIDKKVEGLSKHIKLEEERRSEDAQSKAALTDWLRAKASFVIEGLKEADKDEFCRCELKLQKWYGDLRGKPFAIEAENSILDISGFSKQYNCAFIWQKDGVKKLNLYLIINYFKGGKLRFKKIKPEAFEANRFYTVINKKSGEIVPMEVNFNFDDPNLIILPLAFGKRQGREFIWNDLLSLETGSLKLANGRVIEKTLYNRRTRQDEPALFVALTFERREVLDSSNIKPMNLIGVDRGENIPAVIALTDPEGCPLSRFKDSLGNPTHILRIGESYKEKQRTIQAKKEVEQRRAGGYSRKYASKAKNLADDMVRNTARDLLYYAVTQDAMLIFENLSRGFGRQGKRTFMAERQYTRMEDWLTAKLAYEGLSKTLLSKTLAQYTSKTCSNCGFTITSADYDRVLEKLKKTATGWMTTINGKELKVEGQITYYNRRKRQNVVKDLSVELDRLSEESVNNDISSWTKGRSGEALSLLKKRFSHRPVQEKFVCLNCGFETHADEQAALNIARSWLFLRSQEYKKYQTNKTTGNTDKRAFVETWQSFYRKKLKEVWKPAV

SEQ ID NO: 295 - protein, 977 aa, synthetic construct
  REGION 1..977: note = CasX variant
MQEIKRINKIRRRLVKDSNTKKAGKTGPMKTLLVRVMTPDLRERLENLRKKPENIPQPISNTSRANLNKLLTDYTEMKKAILHVYWEEFQKDPVGLMSRVAQPAPKNIDQRKLIPVKDGNERLTSSGFACSQCCQPLYVYKLEQVNDKGKPHTNYFGRCNVSEHERLILLSPHKPEANDELVTYSLGKFGQRALDFYSIHVTRESNHPVKPLEQIGGNSCASGPVGKALSDACMGAVASFLTKYQDIILEHQKVIKKNEKRLANLKDIASANGLAFPKITLPPQPHTKEGIEAYNNVVAQIVIWVNLNLWQKLKIGRDEAKPLQRLKGFPSFPLVERQANEVDWWDMVCNVKKLINEKKEDGKVFWQNLAGYKRQEALRPYLSSENDRKKGKKFARYQLGDLLLHLEKKHGEDWGKVYDEAWERIDKKVEGLSKHIKLEEERRSEDAQSKAALTDWLRAKASFVIEGLKEADKDEFCRCELKLQKWYGDLRGKPFAIEAENSILDISGFSKQYNCAFIWQKDGVKKLNLYLIINYFKGGKLRFKKIKPEAFEANRFYTVINKKSGEIVPMEVNFNFDDPNLIILPLAFGKRQGREFIWNDLLSLETGSLKLANGRVIEKTLYNRRTRQDEPALFVALTFERREVLDSSNIKPMNLIGVDRGENIPAVIALTDPEGCPLSRFKDSLGNPTHILRIGESYKEKQRTIQAKKEVEQRRAGGYSRKYASKAKNLADDMVRNTARDLLYYAVTQDAMLIFENLSRGFGRQGKRTFMAERQYTRMEDWLTAKLAYEGLSKTLLSKTLAQYTSKTCSNCGFTITSADYDRVLEKLKKTATGWMTTINGKELKVEGQITYYNRRKRQNVVKDLSVELDRLSEESVNNDISSWTKGRSGEALSLLKKRFSHRPVQEKFVCLNCGFETHADEQAALNIARSWLFLRSQEYKKYQTNKTTGNTDKRAFVETWQSFYRKKLKEVWKPAV

SEQ ID NO: 296 - protein, 977 aa, synthetic construct
  REGION 1..977: note = CasX variant
MQEIKRINKIRRRLVKDSNTKKAGKTGPMKTLLVRVMTPDLRERLENLRKKPENIPQPISNTSRANLNKLLTDYTEMKKAILHVYWEEFQKDPVGLMSRVAQPAPKNIDQRKLIPVKDGNERLTSSGFACSQCCQPLYVYKLEQVNDKGKPHTNYFGRCNVSEHERLILLSPHKPEANDELVTYSLGKFGQRALDFYSIHVTRESNHPVKPLEQIGGNSCASGPVGKALSDACMGAVASFLTKYQDIILEHQKVIKKNEKRLANLKDIASANGLAFPKITLPPQPHTKEGIEAYNNVVAQIVIWVNLNLWQKLKIGRDEAKPLQRLKGFPSFPLVERQANEVDWWDMVCNVKKLINEKKEDGKVFWQNLAGYKRQEALRPYLSSENDRKKGKKFARYQLGDLLKHLEKKHGEDWGKVYDEAWERIDKKVEGLSKHIKLEEERRSEDAQSKAALTDWLRAKASFVIEGLKEADKDEFSRCELKLQKWYGDLRGKPFAIEAENSILDISGFSKQYNCAFIWQKDGVKKLNLYLIINYFKGGKLRFKKIKPEAFEANRFYTVINKKSGEIVPMEVNFNFDDPNLIILPLAFGKRQGREFIWNDLLSLETGSLKLANGRVIEKTLYNRRTRQDEPALFVALTFERREVLDSSNIKPMNLIGVDRGENIPAVIALTDPEGCPLSRFKDSLGNPTHILRIGESYKEKQRTIQAKKEVEQRRAGGYSRKYASKAKNLADDMVRNTARDLLYYAVTQDAMLIFENLSRGFGRQGKRTFMAERQYTRMEDWLTAKLAYEGLSKTLLSKTLAQYTSKTCSNCGFTITSADYDRVLEKLKKTATGWMTTINGKELKVEGQITYYNRRKRQNVVKDLSVELDRLSEESVNNDISSWTKGRSGEALSLLKKRFSHRPVQEKFVCLNCGFETHADEQAALNIARSWLFLRSQEYKKYQTNKTTGNTDKRAFVETWQSFYRKKLKEVWKPAV

SEQ ID NO: 297 - protein, 977 aa, synthetic construct
  REGION 1..977: note = CasX variant
MQEIKRINKIRRRLVKDSNTKKAGKTGPMKTLLVRVMTPDLRERLENLRKKPENIPQPISNTSRANLNKLLTDYTEMKKAILHVYWEEFQKDPVGLMSRVAQPAPKNIDQRKLIPVKDGNERLTSSGFACSQCCQPLYVYKLEQVNDKGKPHTNYFGRCNVSEHERLILLSPHKPEANDELVTYSLGKFGQRALDFYSIHVTRESNHPVKPLEQIGGNSCASGPVGKALSDACMGAVASFLTKYQDIILEHQKVIKKNEKRLANLKDIASANGLAFPKITLPPQPHTKEGIEAYNNVVAQIVIWVNLNLWQKLKIGRDEAKPLQRLKGFPSFPLVERQANEVDWWDMVCNVKKLINEKKEDGKVFWQNLAGYKRQEALRPYLSSEEDRKKGKKFARYQFGDLLLHLEKKHGEDWGKVYDEAWERIDKKVEGLSKHIKLEEERRSEDAQSKAALTDWLRAKASFVIEGLKEADKDEFCRCELKLQKWYGDLRGKPFAIEAENSILDISGFSKQYNCAFIWQKDGVKKLNLYLIINYFKGGKLRFKKIKPEAFEANRFYTVINKKSGEIVPMEVNFNFDDPNLIILPLAFGKRQGREFIWNDLLSLETGSLKLANGRVIEKTLYNRRTRQDEPALFVALTFERREVLDSSNIKPMNLIGVDRGENIPAVIALTDPEGCPLSRFKDSLGNPTHILRIGESYKEKQRTIQAKKEVEQRRAGGYSRKYASKAKNLADDMVRNTARDLLYYAVTQDAMLIFENLSRGFGRQGKRTFMAERQYTRMEDWLTAKLAYEGLSKTLLSKTLAQYTSKTCSNCGFTITSADYDRVLEKLKKTATGWMTTINGKELKVEGQITYYNRRKRQNVVKDLSVELDRLSEESVNNDISSWTKGRSGEALSLLKKRFSHRPVQEKFVCLNCGFETHADEQAALNIARSWLFLRSQEYKKYQTNKTTGNTDKRAFVETWQSFYRKKLKEVWKPAV

SEQ ID NO: 298 - protein, 977 aa, synthetic construct
  REGION 1..977: note = CasX variant
MQEIKRINKIRRRLVKDSNTKKAGKTGPMKTLLVRVMTPDLRERLENLRKKPENIPQPISNTSRANLNKLLTDYTEMKKAILHVYWEEFQKDPVGLMSRVAQPAPKNIDQRKLIPVKDGNERLTSSGFACSQCCQPLYVYKLEQVNDKGKPHTNYFGRCNVSEHERLILLSPHKPEANDELVTYSLGKFGQRALDFYSIHVTRESNHPVKPLEQIGGNSCASGPVGKALSDACMGAVASFLTKYQDIILEHQKVIKKNEKRLANLKDIASANGLAFPKITLPPQPHTKEGIEAYNNVVAQIVIWVNLNLWQKLKIGRDEAKPLQRLKGFPSFPLVERQANEVDWWDMVCNVKKLINEKKEDGKVFWQNLAGYKRQEALRPYLSSEEDRKKGKKFARYQFGDLLKHLEKKHGEDWGKVYDEAWERIDKKVEGLSKHIKLEEERRSEDAQSKAALTDWLRAKASFVIEGLKEADKDEFCRCELKLQKWYGDLRGKPFAIEAENSILDISGFSKQYNCAFIWQKDGVKKLNLYLIINYFKGGKLRFKKIKPEAFEANRFYTVINKKSGEIVPMEVNFNFDDPNLIILPLAFGKRQGREFIWNDLLSLETGSLKLANGRVIEKTLYNRRTRQDEPALFVALTFERREVLDSSNIKPMNLIGVDRGENIPAVIALTDPEGCPLSRFKDSLGNPTHILRIGESYKEKQRTIQAKKEVEQRRAGGYSRKYASKAKNLADDMVRNTARDLLYYAVTQDAMLIFENLSRGFGRQGKRTFMAERQYTRMEDWLTAKLAYEGLSKTLLSKTLAQYTSKTCSNCGFTITSADYDRVLEKLKKTATGWMTTINGKELKVEGQITYYNRRKRQNVVKDLSVELDRLSEESVNNDISSWTKGRSGEALSLLKKRFSHRPVQEKFVCLNCGFETHADEQAALNIARSWLFLRSQEYKKYQTNKTTGNTDKRAFVETWQSFYRKKLKEVWKPAV

SEQ ID NO: 299 - protein, 977 aa, synthetic construct
  REGION 1..977: note = CasX variant
MQEIKRINKIRRRLVKDSNTKKAGKTGPMKTLLVRVMTPDLRERLENLRKKPENIPQPISNTSRANLNKLLTDYTEMKKAILHVYWEEFQKDPVGLMSRVAQPAPKNIDQRKLIPVKDGNERLTSSGFACSQCCQPLYVYKLEQVNDKGKPHTNYFGRCNVSEHERLILLSPHKPEANDELVTYSLGKFGQRALDFYSIHVTRESNHPVKPLEQIGGNSCASGPVGKALSDACMGAVASFLTKYQDIILEHQKVIKKNEKRLANLKDIASANGLAFPKITLPPQPHTKEGIEAYNNVVAQIVIWVNLNLWQKLKIGRDEAKPLQRLKGFPSFPLVERQANEVDWWDMVCNVKKLINEKKEDGKVFWQNLAGYKRQEALRPYLSSENDRKKGKKFARYQFGDLLLHLEKKHGEDWGKVYDEAWERIDKKVEGLSKHIKLEEERRSEDAQSKAALTDWLRAKASFVIEGLKEADKDEFCRCELKLQKWYGDLRGKPFAIEAENSILDISGFSKQYNCAFIWQKDGVKKLNLYLIINYFKGGKLRFKKIKPEAFEANRFYTVINKKSGEIVPMEVNFNFDDPNLIILPLAFGKRQGREFIWNDLLSLETGSLKLANGRVIEKTLYNRRTRQDEPALFVALTFERREVLDSSNIKPMNLIGVDRGENIPAVIALTDPEGCPLSRFKDSLGNPTHILRIGESYKEKQRTIQAKKEVEQRRAGGYSRKYASKAKNLADDMVRNTARDLLYYAVTQDAMLIFENLSRGFGRQGKRTFMAERQYTRMEDWLTAKLAYEGLSKTLLSKTLAQYTSKTCSNCGFTITSADYDRVLEKLKKTATGWMTTINGKELKVEGQITYYNRRKRQNVVKDLSVELDRLSEESVNNDISSWTKGRSGEALSLLKKRFSHRPVQEKFVCLNCGFETHADEQAALNIARSWLFLRSQEYKKYQTNKTTGNTDKRAFVETWQSFYRKKLKEVWKPAV

SEQ ID NO: 300 - protein, 977 aa, synthetic construct
  REGION 1..977: note = CasX variant
MQEIKRINKIRRRLVKDSNTKKAGKTGPMKTLLVRVMTPDLRERLENLRKKPENIPQPISNTSRANLNKLLTDYTEMKKAILHVYWEEFQKDPVGLMSRVAQPAPKNIDQRKLIPVKDGNERLTSSGFACSQCCQPLYVYKLEQVNDKGKPHTNYFGRCNVSEHERLILLSPHKPEANDELVTYSLGKFGQRALDFYSIHVTRESNHPVKPLEQIGGNSCASGPVGKALSDACMGAVASFLTKYQDIILEHQKVIKKNEKRLANLKDIASANGLAFPKITLPPQPHTKEGIEAYNNVVAQIVIWVNLNLWQKLKIGRDEAKPLQRLKGFPSFPLVERQANEVDWWDMVCNVKKLINEKKEDGKVFWQNLAGYKRQEALRPYLSSENDRKKGKKFARYQFGDLLKHLEKKHGEDWGKVYDEAWERIDKKVEGLSKHIKLEEERRSEDAQSKAALTDWLRAKASFVIEGLKEADKDEFSRCELKLQKWYGDLRGKPFAIEAENSILDISGFSKQYNCAFIWQKDGVKKLNLYLIINYFKGGKLRFKKIKPEAFEANRFYTVINKKSGEIVPMEVNFNFDDPNLIILPLAFGKRQGREFIWNDLLSLETGSLKLANGRVIEKTLYNRRTRQDEPALFVALTFERREVLDSSNIKPMNLIGVDRGENIPAVIALTDPEGCPLSRFKDSLGNPTHILRIGESYKEKQRTIQAKKEVEQRRAGGYSRKYASKAKNLADDMVRNTARDLLYYAVTQDAMLIFENLSRGFGRQGKRTFMAERQYTRMEDWLTAKLAYEGLSKTLLSKTLAQYTSKTCSNCGFTITSADYDRVLEKLKKTATGWMTTINGKELKVEGQITYYNRRKRQNVVKDLSVELDRLSEESVNNDISSWTKGRSGEALSLLKKRFSHRPVQEKFVCLNCGFETHADEQAALNIARSWLFLRSQEYKKYQTNKTTGNTDKRAFVETWQSFYRKKLKEVWKPAV

SEQ ID NO: 301 - protein, 977 aa, synthetic construct
  REGION 1..977: note = CasX variant
MQEIKRINKIRRRLVKDSNTKKAGKTGPMKTLLVRVMTPDLRERLENLRKKPENIPQPISNTSRANLNKLLTDYTEMKKAILHVYWEEFQKDPVGLMSRVAQPAPKNIDQRKLIPVKDGNERLTSSGFACSQCCQPLYVYKLEQVNDKGKPHTNYFGRCNVSEHERLILLSPHKPEANDELVTYSLGKFGQRALDFYSIHVTRESNHPVKPLEQIGGNSCASGPVGKALSDACMGAVASFLTKYQDIILEHQKVIKKNEKRLANLKDIASANGLAFPKITLPPQPHTKEGIEAYNNVVAQIVIWVNLNLWQKLKIGRDEAKPLQRLKGFPSFPLVERQANEVDWWDMVCNVKKLINEKKEDGKVFWQNLAGYKRQEALRPYLSSENDRKKGKKFARYQFGDLLLHLEKKHGEDWGKVYDEAWERIDKKVEGLSKHIKLEEERRSEDAQSKAALTDWLRAKASFVIEGLKEADKDEFCRCELKLQKWYGDLRGKPFAIEAENSILDISGFSKQYNCAFIWQKDGVKKLNLYLIINYFKGGKLRFKKIKPEAFEANRFYTVINKKSGEIVPMEVNFNFDDPNLIILPLAFGKRQGREFIWNDLLSLETGSLKLANGRVIEKTLYNRRTRQDEPALFVALTFERREVLDSSNIKPMNLIGIDRGENIPAVIALTDPEGCPLSRFKDSLGNPTHILRIGESYKEKQRTIQAKKEVEQRRAGGYSRKYASKAKNLADDMVRNTARDLLYYAVTQDAMLIFENLSRGFGRQGKRTFMAERQYTRMEDWLTAKLAYEGLSKTYLSKTLAQYTSKTCSNCGFTITSADYDRVLEKLKKTATGWMTTINGKELKVEGQITYYNRRKRQNVVKDLSVELDRLSEESVNNDISSWTKGRSGEALSLLKKRFSHRPVQEKFVCLNCGFETHADEQAALNIARSWLFLRSQEYKKYQTNKTTGNTDKRAFVETWQSFYRKKLKEVWKPAV

SEQ ID NO: 302 - protein, 977 aa, synthetic construct
  REGION 1..977: note = CasX variant
MQEIKRINKIRRRLVKDSNTKKAGKTGPMKTLLVRVMTPDLRERLENLRKKPENIPQPISNTSRANLNKLLTDYTEMKKAILHVYWEEFQKDPVGLMSRVAQPAPKNIDQRKLIPVKDGNERLTSSGFACSQCCQPLYVYKLEQVNDKGKPHTNYFGRCNVSEHERLILLSPHKPEANDELVTYSLGKFGQRALDFYSIHVTRESNHPVKPLEQIGGNSCASGPVGKALSDACMGAVASFLTKYQDIILEHQKVIKKNEKRLANLKDIASANGLAFPKITLPPQPHTKEGIEAYNNVVAQIVIWVNLNLWQKLKIGRDEAKPLQRLKGFPSFPLVERQANEVDWWDMVCNVKKLINEKKEDGKVFWQNLAGYKRQEALRPYLSSENDRKKGKKFARYQFGDLLKHLEKKHGEDWGKVYDEAWERIDKKVEGLSKHIKLEEERRSEDAQSKAALTDWLRAKASFVIEGLKEADKDEFCRCELKLQKWYGDLRGKPFAIEAENSILDISGFSKQYNCAFIWQKDGVKKLNLYLIINYFKGGKLRFKKIKPEAFEANRFYTVINKKSGEIVPMEVNFNFDDPNLIILPLAFGKRQGREFIWNDLLSLETGSLKLANGRVIEKTLYNRRTRQDEPALFVALTFERREVLDSSNIKPMNLIGIDRGENIPAVIALTDPEGCPLSRFKDSLGNPTHILRIGESYKEKQRTIQAKKEVEQRRAGGYSRKYASKAKNLADDMVRNTARDLLYYAVTQDAMLIFENLSRGFGRQGKRTFMAERQYTRMEDWLTAKLAYEGLSKTYLSKTLAQYTSKTCSNCGFTITSADYDRVLEKLKKTATGWMTTINGKELKVEGQITYYNRRKRQNVVKDLSVELDRLSEESVNNDISSWTKGRSGEALSLLKKRFSHRPVQEKFVCLNCGFETHADEQAALNIARSWLFLRSQEYKKYQTNKTTGNTDKRAFVETWQSFYRKKLKEVWKPAV

SEQ ID NO: 303 - protein, 977 aa, synthetic construct
  REGION 1..977: note = CasX variant
MQEIKRINKIRRRLVKDSNTKKAGKTGPMKTLLVRVMTPDLRERLENLRKKPENIPQPISNTSRANLNKLLTDYTEMKKAILHVYWEEFQKDPVGLMSRVAQPAPKNIDQRKLIPVKDGNERLTSSGFACSQCCQPLYVYKLEQVNDKGKPHTNYFGRCNVSEHERLILLSPHKPEANDELVTYSLGKFGQRALDFYSIHVTRESNHPVKPLEQIGGNSCASGPVGKALSDACMGAVASFLTKYQDIILEHQKVIKKNEKRLANLKDIASANGLAFPKITLPPQPHTKEGIEAYNNVVAQIVIWVNLNLWQKLKIGRDEAKPLQRLKGFPSFPLVERQANEVDWWDMVCNVKKLINEKKEDGKVFWQNLAGYKRQEALRPYLSSPEDRKKGKKFARYQFGDLLLHLEKKHGEDWGKVYDEAWERIDKKVEGLSKHIKLEEERRSEDAQSKAALTDWLRAKASFVIEGLKEADKDEFCRCELKLQKWYGDLRGKPFAIEAENSILDISGFSKQYNCAFIWQKDGVKKLNLYLIINYFKGGKLRFKKIKPEAFEANRFYTVINKKSGEIVPMEVNFNFDDPNLIILPLAFGKRQGREFIWNDLLSLETGSLKLANGRVIEKTLYNRRTRQDEPALFVALTFERREVLDSSNIKPMNLIGIDRGENIPAVIALTDPEGCPLSRFKDSLGNPTHILRIGESYKEKQRTIQAKKEVEQRRAGGYSRKYASKAKNLANDMVRNTARDLLYYAVTQDAMLIFENLSRGFGRQGKRTFMAERQYTRMEDWLTAKLAYEGLSKTYLSKTLAQYTSKTCSNCGFTITSADYDRVLEKLKKTATGWMTTINGKELKVEGQITYYNRRKRQNVVKDLSVELDRLSEESVNNDISSWTKGRSGEALSLLKKRFSHRPVQEKFVCLNCGFETHADEQAALNIARSWLFLRSQEYKKYQTNKTTGNTDKRAFVETWQSFYRKKLKEVWKPAV

SEQ ID NO: 304 - protein, 977 aa, synthetic construct
  REGION 1..977: note = CasX variant
MQEIKRINKIRRRLVKDSNTKKAGKTGPMKTLLVRVMTPDLRERLENLRKKPENIPQPISNTSRANLNKLLTDYTEMKKAILHVYWEEFQKDPVGLMSRVAQPAPKNIDQRKLIPVKDGNERLTSSGFACSQCCQPLYVYKLEQVNDKGKPHTNYFGRCNVSEHERLILLSPHKPEANDELVTYSLGKFGQRALDFYSIHVTRESNHPVKPLEQIGGNSCASGPVGKALSDACMGAVASFLTKYQDIILEHQKVIKKNEKRLANLKDIASANGLAFPKITLPPQPHTKEGIEAYNNVVAQIVIWVNLNLWQKLKIGRDEAKPLQRLKGFPSFPLVERQANEVDWWDMVCNVKKLINEKKEDGKVFWQNLAGYKRQEALRPYLSSPEDRKKGKKFARYQFGDLLLHLEKKHGEDWGKVYDEAWERIDKKVEGLSKHIKLEEERRSEDAQSKAALTDWLRAKASFVIEGLKEADKDEFCRCELKLQKWYGDLRGKPFAIEAENSILDISGFSKQYNCAFIWQKDGVKKLNLYLIINYFKGGKLRFKKIKPEAFEANRFYTVINKKSGEIVPMEVNFNFDDPNLIILPLAFGKRQGREFIWNDLLSLETGSLKLANGRVIEKTLYNRRTRQDEPALFVALTFERREVLDSSNIKPMNLIGVDRGENIPAVIALTDPEGCPLSRFKDSLGNPTHILRIGESYKEKQRTIQAKKEVEQRRAGGYSRKYASKAKNLANDMVRNTARDLLYYAVTQDAMLIFENLSRGFGRQGKRTFMAERQYTRMEDWLTAKLAYEGLSKTYLSKTLAQYTSKTCSNCGFTITSADYDRVLEKLKKTATGWMTTINGKELKVEGQITYYNRRKRQNVVKDLSVELDRLSEESVNNDISSWTKGRSGEALSLLKKRFSHRPVQEKFVCLNCGFETHADEQAALNIARSWLFLRSQEYKKYQTNKTTGNTDKRAFVETWQSFYRKKLKEVWKPAV

SEQ ID NO: 305 - protein, 977 aa, synthetic construct
  REGION 1..977: note = CasX variant
MQEIKRINKIRRRLVKDSNTKKAGKTGPMKTLLVRVMTPDLRERLENLRKKPENIPQPISNTSRANLNKLLTDYTEMKKAILHVYWEEFQKDPVGLMSRVAQPAPKNIDQRKLIPVKDGNERLTSSGFACSQCCQPLYVYKLEQVNDKGKPHTNYFGRCNVSEHERLILLSPHKPEANDELVTYSLGKFGQRALDFYSIHVTRESNHPVKPLEQIGGNSCASGPVGKALSDACMGAVASFLTKYQDIILEHQKVIKKNEKRLANLKDIASANGLAFPKITLPPQPHTKEGIEAYNNVVAQIVIWVNLNLWQKLKIGRDEAKPLQRLKGFPSFPLVERQANEVDWWDMVCNVKKLINEKKEDGKVFWQNLAGYKRQEALRPYLSSPEDRKKGKKFARYQLGDLLLHLEKKHGEDWGKVYDEAWERIDKKVEGLSKHIKLEEERRSEDAQSKAALTDWLRAKASFVIEGLKEADKDEFCRCELKLQKWYGDLRGKPFAIEAENSILDISGFSKQYNCAFIWQKDGVKKLNLYLIINYFKGGKLRFKKIKPEAFEANRFYTVINKKSGEIVPMEVNFNFDDPNLIILPLAFGKRQGREFIWNDLLSLETGSLKLANGRVIEKTLYNRRTRQDEPALFVALTFERREVLDSSNIKPMNLIGVDRGENIPAVIALTDPEGCPLSRFKDSLGNPTHILRIGESYKEKQRTIQAKKEVEQRRAGGYSRKYASKAKNLANDMVRNTARDLLYYAVTQDAMLIFENLSRGFGRQGKRTFMAERQYTRMEDWLTAKLAYEGLSKTYLSKTLAQYTSKTCSNCGFTITSADYDRVLEKLKKTATGWMTTINGKELKVEGQITYYNRRKRQNVVKDLSVELDRLSEESVNNDISSWTKGRSGEALSLLKKRFSHRPVQEKFVCLNCGFETHADEQAALNIARSWLFLRSQEYKKYQTNKTTGNTDKRAFVETWQSFYRKKLKEVWKPAV

SEQ ID NO: 306 - protein, 977 aa, synthetic construct
  REGION 1..977: note = CasX variant
MQEIKRINKIRRRLVKDSNTKKAGKTGPMKTLLVRVMTPDLRERLENLRKKPENIPQPISNTSRANLNKLLTDYTEMKKAILHVYWEEFQKDPVGLMSRVAQPAPKNIDQRKLIPVKDGNERLTSSGFACSQCCQPLYVYKLEQVNDKGKPHTNYFGRCNVSEHERLILLSPHKPEANDELVTYSLGKFGQRALDFYSIHVTRESNHPVKPLEQIGGNSCASGPVGKALSDACMGAVASFLTKYQDIILEHQKVIKKNEKRLANLKDIASANGLAFPKITLPPQPHTKEGIEAYNNVVAQIVIWVNLNLWQKLKIGRDEAKPLQRLKGFPSFPLVERQANEVDWWDMVCNVKKLINEKKEDGKVFWQNLAGYKRQEALRPYLSSPNDRKKGKKFARYQFGDLLLHLEKKHGEDWGKVYDEAWERIDKKVEGLSKHIKLEEERRSEDAQSKAALTDWLRAKASFVIEGLKEADKDEFCRCELKLQKWYGDLRGKPFAIEAENSILDISGFSKQYNCAFIWQKDGVKKLNLYLIINYFKGGKLRFKKIKPEAFEANRFYTVINKKSGEIVPMEVNFNFDDPNLIILPLAFGKRQGREFIWNDLLSLETGSLKLANGRVIEKTLYNRRTRQDEPALFVALTFERREVLDSSNIKPMNLIGVDRGENIPAVIALTDPEGCPLSRFKDSLGNPTHILRIGESYKEKQRTIQAKKEVEQRRAGGYSRKYASKAKNLANDMVRNTARDLLYYAVTQDAMLIFENLSRGFGRQGKRTFMAERQYTRMEDWLTAKLAYEGLSKTYLSKTLAQYTSKTCSNCGFTITSADYDRVLEKLKKTATGWMTTINGKELKVEGQITYYNRRKRQNVVKDLSVELDRLSEESVNNDISSWTKGRSGEALSLLKKRFSHRPVQEKFVCLNCGFETHADEQAALNIARSWLFLRSQEYKKYQTNKTTGNTDKRAFVETWQSFYRKKLKEVWKPAV

SEQ ID NO: 307 - protein, 977 aa, synthetic construct
  REGION 1..977: note = CasX variant
MQEIKRINKIRRRLVKDSNTKKAGKTGPMKTLLVRVMTPDLRERLENLRKKPENIPQPISNTSRANLNKLLTDYTEMKKAILHVYWEEFQKDPVGLMSRVAQPAPKNIDQRKLIPVKDGNERLTSSGFACSQCCQPLYVYKLEQVNDKGKPHTNYFGRCNVSEHERLILLSPHKPEANDELVTYSLGKFGQRALDFYSIHVTRESNHPVKPLEQIGGNSCASGPVGKALSDACMGAVASFLTKYQDIILEHQKVIKKNEKRLANLKDIASANGLAFPKITLPPQPHTKEGIEAYNNVVAQIVIWVNLNLWQKLKIGRDEAKPLQRLKGFPSFPLVERQANEVDWWDMVCNVKKLINEKKEDGKVFWQNLAGYKRQEALRPYLSSPEDRKKGKKFARYQFGDLLKHLEKKHGEDWGKVYDEAWERIDKKVEGLSKHIKLEEERRSEDAQSKAALTDWLRAKASFVIEGLKEADKDEFCRCELKLQKWYGDLRGKPFAIEAENSILDISGFSKQYNCAFIWQKDGVKKLNLYLIINYFKGGKLRFKKIKPEAFEANRFYTVINKKSGEIVPMEVNFNFDDPNLIILPLAFGKRQGREFIWNDLLSLETGSLKLANGRVIEKTLYNRRTRQDEPALFVALTFERREVLDSSNIKPMNLIGVDRGENIPAVIALTDPEGCPLSRFKDSLGNPTHILRIGESYKEKQRTIQAKKEVEQRRAGGYSRKYASKAKNLANDMVRNTARDLLYYAVTQDAMLIFENLSRGFGRQGKRTFMAERQYTRMEDWLTAKLAYEGLSKTYLSKTLAQYTSKTCSNCGFTITSADYDRVLEKLKKTATGWMTTINGKELKVEGQITYYNRRKRQNVVKDLSVELDRLSEESVNNDISSWTKGRSGEALSLLKKRFSHRPVQEKFVCLNCGFETHADEQAALNIARSWLFLRSQEYKKYQTNKTTGNTDKRAFVETWQSFYRKKLKEVWKPAV

SEQ ID NO: 308 - protein, 977 aa, synthetic construct
  REGION 1..977: note = CasX variant
MQEIKRINKIRRRLVKDSNTKKAGKTGPMKTLLVRVMTPDLRERLENLRKKPENIPQPISNTSRANLNKLLTDYTEMKKAILHVYWEEFQKDPVGLMSRVAQPAPKNIDQRKLIPVKDGNERLTSSGFACSQCCQPLYVYKLEQVNDKGKPHTNYFGRCNVSEHERLILLSPHKPEANDELVTYSLGKFGQRALDFYSIHVTRESNHPVKPLEQIGGNSCASGPVGKALSDACMGAVASFLTKYQDIILEHKKVIKKNEKRLANLKDIASANGLAFPKITLPPQPHTKEGIEAYNNVVAQIVIWVNLNLWQKLKIGRDEAKPLQRLKGFPSFPLVERQANEVDWWDMVCNVKKLINEKKEDGKVFWQNLAGYKRQEALRPYLSSPEDRKKGKKFARYQFGDLLLHLEKKHGEDWGKVYDEAWERIDKKVEGLSKHIKLEEERRSEDAQSKAALTDWLRAKASFVIEGLKEADKDEFCRCELKLQKWYGDLRGKPFAIEAENSILDISGFSKQYNCAFIWQKDGVKKLNLYLIINYFKGGKLRFKKIKPEAFEANRFYTVINKKSGEIVPMEVNFNFDDPNLIILPLAFGKRQGREFIWNDLLSLETGSLKLANGRVIEKPLYNRRTRQDEPALFVALTFERREVLDSSNIKPMNLIGIDRGENIPAVIALTDPEGCPLSRFKDSLGNPTHILRIGESYKEKQRTIQAKKEVEQRRAGGYSRKYASKAKNLADDMVRNTARDLLYYAVTQDAMLIFENLSRGFGRQGKRTFMAERQYTRMEDWLTAKLAYEGLSKTYLSKTLAQYTSKTCSNCGFTITSADYDRVLEKLKKTATGWMTTINGKELKVEGQITYYNRRKRQNVVKDLSVELDRLSEESVNNDISSWTKGRSGEALSLLKKRFSHRPVQEKFVCLNCGFETHADEQAALNIARSWLFLRSQEYKKYQTNKTTGNTDKRAFVETWQSFYRKKLKEVWKPAV

SEQ ID NO: 309 - protein, 977 aa, synthetic construct
  REGION 1..977: note = CasX variant
MQEIKRINKIRRRLVKDSNTKKAGKTGPMKTLLVRVMTPDLRERLENLRKKPENIPQPISNTSRANLNKLLTDYTEMKKAILHVYWEEFQKDPVGLMSRVAQPAPKNIDQRKLIPVKDGNERLTSSGFACSQCCQPLYVYKLEQVNDKGKPHTNYFGRCNVSEHERLILLSPHKPEANDELVTYSLGKFGQRALDFYSIHVTRESNHPVKPLEQIGGNSCASGPVGKALSDACMGAVASFLTKYQDIILEHKKVIKKNEKRLANLKDIASANGLAFPKITLPPQPHTKEGIEAYNNVVAQIVIWVNLNLWQKLKIGRDEAKPLQRLKGFPSFPLVERQANEVDWWDMVCNVKKLINEKKEDGKVFWQNLAGYKRQEALRPYLSSPEDRKKGKKFARYQFGDLLLHLEKKHGEDWGKVYDEAWERIDKKVEGLSKHIKLEEERRSEDAQSKAALTDWLRAKASFVIEGLKEADKDEFCRCELKLQKWYGDLRGKPFAIEAENSILDISGFSKQYNCAFIWQKDGVKKLNLYLIINYFKGGKLRFKKIKPEAFEANRFYTVINKKSGEIVPMEVNFNFDDPNLIILPLAFGKRQGREFIWNDLLSLETGSLKLANGRVIEKPLYNRRTRQDEPALFVALTFERREVLDSSNIKPMNLIGVDRGENIPAVIALTDPEGCPLSRFKDSLGNPTHILRIGESYKEKQRTIQAKKEVEQRRAGGYSRKYASKAKNLADDMVRNTARDLLYYAVTQDAMLIFENLSRGFGRQGKRTFMAERQYTRMEDWLTAKLAYEGLSKTYLSKTLAQYTSKTCSNCGFTITSADYDRVLEKLKKTATGWMTTINGKELKVEGQITYYNRRKRQNVVKDLSVELDRLSEESVNNDISSWTKGRSGEALSLLKKRFSHRPVQEKFVCLNCGFETHADEQAALNIARSWLFLRSQEYKKYQTNKTTGNTDKRAFVETWQSFYRKKLKEVWKPAV

SEQ ID NO: 310 - protein, 977 aa, synthetic construct
  REGION 1..977: note = CasX variant
MQEIKRINKIRRRLVKDSNTKKAGKTGPMKTLLVRVMTPDLRERLENLRKKPENIPQPISNTSRANLNKLLTDYTEMKKAILHVYWEEFQKDPVGLMSRVAQPAPKNIDQRKLIPVKDGNERLTSSGFACSQCCQPLYVYKLEQVNDKGKPHTNYFGRCNVSEHERLILLSPHKPEANDELVTYSLGKFGQRALDFYSIHVTRESNHPVKPLEQIGGNSCASGPVGKALSDACMGAVASFLTKYQDIILEHKKVIKKNEKRLANLKDIASANGLAFPKITLPPQPHTKEGIEAYNNVVAQIVIWVNLNLWQKLKIGRDEAKPLQRLKGFPSFPLVERQANEVDWWDMVCNVKKLINEKKEDGKVFWQNLAGYKRQEALRPYLSSPNDRKKGKKFARYQFGDLLLHLEKKHGEDWGKVYDEAWERIDKKVEGLSKHIKLEEERRSEDAQSKAALTDWLRAKASFVIEGLKEADKDEFCRCELKLQKWYGDLRGKPFAIEAENSILDISGFSKQYNCAFIWQKDGVKKLNLYLIINYFKGGKLRFKKIKPEAFEANRFYTVINKKSGEIVPMEVNFNFDDPNLIILPLAFGKRQGREFIWNDLLSLETGSLKLANGRVIEKPLYNRRTRQDEPALFVALTFERREVLDSSNIKPMNLIGVDRGENIPAVIALTDPEGCPLSRFKDSLGNPTHILRIGESYKEKQRTIQAKKEVEQRRAGGYSRKYASKAKNLADDMVRNTARDLLYYAVTQDAMLIFENLSRGFGRQGKRTFMAERQYTRMEDWLTAKLAYEGLSKTYLSKTLAQYTSKTCSNCGFTITSADYDRVLEKLKKTATGWMTTINGKELKVEGQITYYNRRKRQNVVKDLSVELDRLSEESVNNDISSWTKGRSGEALSLLKKRFSHRPVQEKFVCLNCGFETHADEQAALNIARSWLFLRSQEYKKYQTNKTTGNTDKRAFVETWQSFYRKKLKEVWKPAV

SEQ ID NO: 311 - protein, 977 aa, synthetic construct
  REGION 1..977: note = CasX variant
MQEIKRINKIRRRLVKDSNTKKAGKTGPMKTLLVRVMTPDLRERLENLRKKPENIPQPISNTSRANLNKLLTDYTEMKKAILHVYWEEFQKDPVGLMSRVAQPAPKNIDQRKLIPVKDGNERLTSSGFACSQCCQPLYVYKLEQVNDKGKPHTNYFGRCNVSEHERLILLSPHKPEANDELVTYSLGKFGQRALDFYSIHVTRESNHPVKPLEQIGGNSCASGPVGKALSDACMGAVASFLTKYQDIILEHKKVIKKNEKRLANLKDIASANGLAFPKITLPPQPHTKEGIEAYNNVVAQIVIWVNLNLWQKLKIGRDEAKPLQRLKGFPSFPLVERQANEVDWWDMVCNVKKLINEKKEDGKVFWQNLAGYKRQEALRPYLSSPEDRKKGKKFARYQLGDLLLHLEKKHGEDWGKVYDEAWERIDKKVEGLSKHIKLEEERRSEDAQSKAALTDWLRAKASFVIEGLKEADKDEFCRCELKLQKWYGDLRGKPFAIEAENSILDISGFSKQYNCAFIWQKDGVKKLNLYLIINYFKGGKLRFKKIKPEAFEANRFYTVINKKSGEIVPMEVNFNFDDPNLIILPLAFGKRQGREFIWNDLLSLETGSLKLANGRVIEKPLYNRRTRQDEPALFVALTFERREVLDSSNIKPMNLIGVDRGENIPAVIALTDPEGCPLSRFKDSLGNPTHILRIGESYKEKQRTIQAKKEVEQRRAGGYSRKYASKAKNLADDMVRNTARDLLYYAVTQDAMLIFENLSRGFGRQGKRTFMAERQYTRMEDWLTAKLAYEGLSKTYLSKTLAQYTSKTCSNCGFTITSADYDRVLEKLKKTATGWMTTINGKELKVEGQITYYNRRKRQNVVKDLSVELDRLSEESVNNDISSWTKGRSGEALSLLKKRFSHRPVQEKFVCLNCGFETHADEQAALNIARSWLFLRSQEYKKYQTNKTTGNTDKRAFVETWQSFYRKKLKEVWKPAV

SEQ ID NO: 312 - protein, 977 aa, synthetic construct
  REGION 1..977: note = CasX variant
MQEIKRINKIRRRLVKDSNTKKAGKTGPMKTLLVRVMTPDLRERLENLRKKPENIPQPISNTSRANLNKLLTDYTEMKKAILHVYWEEFQKDPVGLMSRVAQPAPKNIDQRKLIPVKDGNERLTSSGFACSQCCQPLYVYKLEQVNDKGKPHTNYFGRCNVSEHERLILLSPHKPEANDELVTYSLGKFGQRALDFYSIHVTRESNHPVKPLEQIGGNSCASGPVGKALSDACMGAVASFLTKYQDIILEHKKVIKKNEKRLANLKDIASANGLAFPKITLPPQPHTKEGIEAYNNVVAQIVIWVNLNLWQKLKIGRDEAKPLQRLKGFPSFPLVERQANEVDWWDMVCNVKKLINEKKEDGKVFWQNLAGYKRQEALRPYLSSPEDRKKGKKFARYQFGDLLKHLEKKHGEDWGKVYDEAWERIDKKVEGLSKHIKLEEERRSEDAQSKAALTDWLRAKASFVIEGLKEADKDEFCRCELKLQKWYGDLRGKPFAIEAENSILDISGFSKQYNCAFIWQKDGVKKLNLYLIINYFKGGKLRFKKIKPEAFEANRFYTVINKKSGEIVPMEVNFNFDDPNLIILPLAFGKRQGREFIWNDLLSLETGSLKLANGRVIEKPLYNRRTRQDEPALFVALTFERREVLDSSNIKPMNLIGVDRGENIPAVIALTDPEGCPLSRFKDSLGNPTHILRIGESYKEKQRTIQAKKEVEQRRAGGYSRKYASKAKNLADDMVRNTARDLLYYAVTQDAMLIFENLSRGFGRQGKRTFMAERQYTRMEDWLTAKLAYEGLSKTYLSKTLAQYTSKTCSNCGFTITSADYDRVLEKLKKTATGWMTTINGKELKVEGQITYYNRRKRQNVVKDLSVELDRLSEESVNNDISSWTKGRSGEALSLLKKRFSHRPVQEKFVCLNCGFETHADEQAALNIARSWLFLRSQEYKKYQTNKTTGNTDKRAFVETWQSFYRKKLKEVWKPAV

SEQ ID NO: 313 - protein, 977 aa, synthetic construct
  REGION 1..977: note = CasX variant
MQEIKRINKIRRRLVKDSNTKKAGKTGPMKTLLVRVMTPDLRERLENLRKKPENIPQPISNTSRANLNKLLTDYTEMKKAILHVYWEEFQKDPVGLMSRVAQPAPKNIDQRKLIPVKDGNERLTSSGFACSQCCQPLYVYKLEQVNDKGKPHTNYFGRCNVSEHERLILLSPHKPEANDELVTYSLGKFGQRALDFYSIHVTRESNHPVKPLEQIGGNSCASGPVGKALSDACMGAVASFLTKYQDIILEHQKVIKKNEKRLANLKDIASANGLAFPKITLPPQPHTKEGIEAYNNVVAQIVIWVNLNLWQKLKIGRDEAKPLQRLKGFPSFPLVERQANEVDWWDMVCNVKKLINEKKEDGKVFWQNLAGYKRQEALRPYLSSENDRKKGKKFARYQFGDLLLHLEKKHGEDWGKVYDEAWERIDKKVEGLSKHIKLEEERRSEDAQSKAALTDWLRAKASFVIEGLKEADKDEFCRCELKLQKWYGDLRGKPFAIEAENSILDISGFSKQYNCAFIWQKDGVKKLNLYLIINYFKGGKLRFKKIKPEAFEANRFYTVINKKSGEIVPMEVNFNFDDPNLIILPLAFGKRQGREFIWNDLLSLETGSLKLANGRVIEKPLYNRRTRQDEPALFVALTFERREVLDSSNIKPMNLIGVDRGENIPAVIALTDPEGCPLSRFKDSLGNPTHILRIGESYKEKQRTIQAKKEVEQRRAGGYSRKYASKAKNLADDMVRNTARDLLYYAVTQDAMLIFENLSRGFGRQGKRTFMAERQYTRMEDWLTAKLAYEGLSKTYLSKTLAQYTSKTCSNCGFTITSADYDRVLEKLKKTATGWMTTINGKELKVEGQITYYNRRKRQNVVKDLSVELDRLSEESVNNDISSWTKGRSGEALSLLKKRFSHRPVQEKFVCLNCGFETHADEQAALNIARSWLFLRSQEYKKYQTNKTTGNTDKRAFVETWQSFYRKKLKEVWKPAV

SEQ ID NO: 314 - protein, 977 aa, synthetic construct
  REGION 1..977: note = CasX variant
MQEIKRINKIRRRLVKDSNTKKAGKTGPMKTLLVRVMTPDLRERLENLRKKPENIPQPISNTSRANLNKLLTDYTEMKKAILHVYWEEFQKDPVGLMSRVAQPAPKNIDQRKLIPVKDGNERLTSSGFACSQCCQPLYVYKLEQVNDKGKPHTNYFGRCNVSEHERLILLSPHKPEANDELVTYSLGKFGQRALDFYSIHVTRESNHPVKPLEQIGGNSCASGPVGKALSDACMGAVASFLTKYQDIILEHKKVIKKNEKRLANLKDIASANGLAFPKITLPPQPHTKEGIEAYNNVVAQIVIWVNLNLWQKLKIGRDEAKPLQRLKGFPSFPLVERQANEVDWWDMVCNVKKLINEKKEDGKVFWQNLAGYKRQEALRPYLSSPEDRKKGKKFARYQFGDLLLHLEKKHGEDWGKVYDEAWERIDKKVEGLSKHIKLEEERRSEDAQSKAALTDWLRAKASFVIEGLKEADKDEFCRCELKLQKWYGDLRGKPFAIEAENSILDISGFSKQYNCAFIWQKDGVKKLNLYLIINYFKGGKLRFKKIKPEAFEANRFYTVINKKSGEIVPMEVNFNFDDPNLIILPLAFGKRQGREFIWNDLLSLETGSLKLANGRVIEKPLYNRRTRQDEPALFVALTFERREVLDSSNIKPMNLIGIDRGENIPAVIALTDPEGCPLSRFKDSLGNPTHILRIGESYKEKQRTIQAKKEVEQRRAGGYSRKYASKAKNLADDMVRNTARDLLYYAVTQDAMLIFENLSRGFGRQGKRTFMAERQYTRMEDWLTAKLAYEGLSKTYLSKTLAQYTSKTCSNCGFTITSADYDRVLEKLKKTATGWMTTINGKELKVEGQITYYNRYKRQNVVKDLSVELDRLSEESVNNDISSWTKGRSGEALSLLKKRFSHRPVQEKFVCLNCGFETHADEQAALNIARSWLFLRSQEYKKYQTNKTTGNTDKRAFVETWQSFYRKKLKEVWKPAV

SEQ ID NO: 315 - protein, 976 aa, synthetic construct
  REGION 1..976: note = CasX variant
QEIKRINKIRRRLVKDSNTKKAGKTGPMKTLLVRVMTPDLRERLENLRKKPENIPQPISNTSRANLNKLLTDYTEMKKAILHVYWEEFQKDPVGLMSRVAQPAPKNIDQRKLIPVKDGNERLTSSGFACSQCCQPLYVYKLEQVNDKGKPHTNYFGRCNVSEHERLILLSPHKPEANDELVTYSLGKFGQRALDFYSIHVTRESNHPVKPLEQIGGNSCASGPVGKALSDACMGAVASFLTKYQDIILEHQKVIKKNEKRLANLKDIASANGLAFPKITLPPQPHTKEGIEAYNNVVAQIVIWVNLNLWQKLKIGRDEAKPLQRLKGFPSFPLVERQANEVDWWDMVCNVKKLINEKKEDGKVFWQNLAGYKRQEALRPYLSSEEDRKKGKKFARYQFGDLLLHLEKKHGEDWGKVYDEAWERIDKKVEGLSKHIKLEEERRSEDAQSKAALTDWLRAKASFVIEGLKEADKDEFCRCELKLQKWYGDLRGKPFAIEAENSILDISGFSKQYNCAFIWQKDGVKKLNLYLIINYFKGGKLRFKKIKPEAFEANRFYTVINKKSGEIVPMEVNFNFDDPNLIILPLAFGKRQGREFIWNDLLSLETGSLKLANGRVIEKTLYNRRTRQDEPALFVALTFERREVLDSSNIKPMNLIGIDRGENIPAVIALTDPEGCPLSRFKDSLGNPTHILRIGESYKEKQRTIQAKKEVEQRRAGGYSRKYASKAKNLADDMVRNTARDLLYYAVTQDAMLIFENLSRGFGRQGKRTFMAERQYTRMEDWLTAKLAYEGLSKTYLSKTLAQYTSKTCSNCGFTITSADYDRVLEKLKKTATGWMTTINGKELKVEGQITYYNRYKRQNVVKDLSVELDRLSEESVNNDISSWTKGRSGEALSLLKKRFSHRPVQEKFVCLNCGFETHADEQAALNIARSWLFLRSQEYKKYQTNKTTGNTDKRAFVETWQSFYRKKLKEVWKPAV

SEQ ID NO: 316 - protein, 977 aa, synthetic construct; identical to SEQ ID NO: 270
  REGION 1..977: note = CasX variant

SEQ ID NO: 317 - protein, 977 aa, synthetic construct; identical to SEQ ID NO: 270
  REGION 1..977: note = CasX variant

SEQ ID NO: 318 - protein, 977 aa, synthetic construct; identical to SEQ ID NO: 270
  REGION 1..977: note = CasX variant

SEQ ID NO: 319 - protein, 977 aa, synthetic construct; identical to SEQ ID NO: 270
  REGION 1..977: note = CasX variant

SEQ ID NO: 320 - protein, 977 aa, synthetic construct; identical to SEQ ID NO: 270
  REGION 1..977: note = CasX variant

SEQ ID NO: 321 - protein, 978 aa, synthetic construct
  REGION 1..978: note = CasX variant
MQEIKRINKIRRRLVKDSNTKKAGKTGPMKTLLVRVMTPDLRERLENLRKKPENIPQPISNTSRANLNKLLTDYTEMKKAILHVYWEEFQKDPVGLMSRVAQPAPKNIDQRKLIPVKDGNERLTMSSGFACSQCCQPLYVYKLEQVNDKGKPHTNYFGRCNVSEHERLILLSPHKPEANDELVTYSLGKFGQRALDFYSIHVTRESNHPVKPLEQIGGNSCASGPVGKALSDACMGAVASFLTKYQDIILEHQKVIKKNEKRLANLKDIASANGLAFPKITLPPQPHTKEGIEAYNNVVAQIVIWVNLNLWQKLKIGRDEAKPLQRLKGFPSFPLVERQANEVDWWDMVCNVKKLINEKKEDGKVFWQNLAGYKRQEALRPYLSSEEDRKKGKKFARYQFGDLLLHLEKKHGEDWGKVYDEAWERIDKKVEGLSKHIKLEEERRSEDAQSKAALTDWLRAKASFVIEGLKEADKDEFCRCELKLQKWYGDLRGKPFAIEAENSILDISGFSKQYNCAFIWQKDGVKKLNLYLIINYFKGGKLRFKKIKPEAFEANRFYTVINKKSGEIVPMEVNFNFDDPNLIILPLAFGKRQGREFIWNDLLSLETGSLKLANGRVIEKTLYNRRTRQDEPALFVALTFERREVLDSSNIKPMNLIGIDRGENIPAVIALTDPEGCPLSRFKDSLGNPTHILRIGESYKEKQRTIQAKKEVEQRRAGGYSRKYASKAKNLADDMVRNTARDLLYYAVTQDAMLIFENLSRGFGRQGKRTFMAERQYTRMEDWLTAKLAYEGLSKTYLSKTLAQYTSKTCSNCGFTITSADYDRVLEKLKKTATGWMTTINGKELKVEGQITYYNRYKRQNVVKDLSVELDRLSEESVNNDISSWTKGRSGEALSLLKKRFSHRPVQEKFVCLNCGFETHADEQAALNIARSWLFLRSQEYKKYQTNKTTGNTDKRAFVETWQSFYRKKLKEVWKPAV

SEQ ID NO: 322 - protein, 977 aa, synthetic construct; identical to SEQ ID NO: 270
  REGION 1..977: note = CasX variant

SEQ ID NO: 323 - protein, 977 aa, synthetic construct; identical to SEQ ID NO: 270
  REGION 1..977: note = CasX variant

SEQ ID NO: 324 - protein, 977 aa, synthetic construct; identical to SEQ ID NO: 270
  REGION 1..977: note = CasX variant

SEQ ID NO: 325 - protein, 977 aa, synthetic construct; identical to SEQ ID NO: 270
  REGION 1..977: note = CasX variant

SEQ ID NO: 326 - protein, 977 aa, synthetic construct; identical to SEQ ID NO: 270
  REGION 1..977: note = CasX variant

SEQ ID NO: 327 - protein, 977 aa, synthetic construct; identical to SEQ ID NO: 270
  REGION 1..977: note = CasX variant

SEQ ID NO: 328 - protein, 977 aa, synthetic construct
  REGION 1..977: note = CasX variant
QEIKRINKIRRRLVKDSNTKKAGKTGPMKTLLVRVMTPDLRERLENLRKKPENIPQPISNTSRANLNKLLTDYTEMKKAILHVYWEEFQKDPVGLMSRVAQPASKKIDQNKLKPEMDEKGNLTTAGFACSQCGQPLFVYKLEQVSEKGKAYTNYFGRCNVAEHEKLILLAQLKPEKDSDEAVTYSLGKFGQRALDFYSIHVTRESNHPVKPLEQIGGNSCASGPVGKALSDACMGAVASFLTKYQDIILEHQKVIKKNEKRLANLKDIASANGLAFPKITLPPQPHTKEGIEAYNNVVAQIVIWVNLNLWQKLKIGRDEAKPLQRLKGFPSFPLVERQANEVDWWDMVCNVKKLINEKKEDGKVFWQNLAGYKRQEALRPYLSSEEDRKKGKKFARYQFGDLLLHLEKKHGEDWGKVYDEAWERIDKKVEGLSKHIKLEEERRSEDAQSKAALTDWLRAKASFVIEGLKEADKDEFCRCELKLQKWYGDLRGKPFAIEAENSILDISGFSKQYNCAFIWQKDGVKKLNLYLIINYFKGGKLRFKKIKPEAFEANRFYTVINKKSGEIVPMEVNFNFDDPNLIILPLAFGKRQGREFIWNDLLSLETGSLKLANGRVIEKTLYNRRTRQDEPALFVALTFERREVLDSSNIKPMNLIGIDRGENIPAVIALTDPEGCPLSRFKDSLGNPTHILRIGESYKEKQRTIQAKKEVEQRRAGGYSRKYASKAKNLADDMVRNTARDLLYYAVTQDAMLIFENLSRGFGRQGKRTFMAERQYTRMEDWLTAKLAYEGLSKTYLSKTLAQYTSKTCSNCGFTITSADYDRVLEKLKKTATGWMTTINGKELKVEGQITYYNRYKRQNVVKDLSVELDRLSEESVNNDISSWTKGRSGEALSLLKKRFSHRPVQEKFVCLNCGFETHADEQAALNIARSWLFLRSQEYKKYQTNKTTGNTDKRAFVETWQSFYRKKLKEVWKPAV

SEQ ID NO: 329 - protein, 976 aa, synthetic construct
  REGION 1..976: note = CasX variant
QEIKRINKIRRRLVKDSNTKKAGKTGPMKTLLVRVMTPDLRERLENLRKKPENIPQPISNTSRANLNKLLTDYTEMKKAILHVYWEEFQKDPVGLMSRVAQPAPKNIDQRKLIPVKDGNERLTSSGFACSQCCQPLYVYKLEQVNDKGKPHTNYFGRCNVSEHERLILLSPHKPEANDELVTYSLGKFGQRALDFYSIHVTKESTHPVKPLAQIAGNRYASGPVGKALSDACMGTIASFLSKYQDIIIEHQKVVKGNQKRLESLRELAGKENLEYPSVTLPPQPHTKEGVDAYNEVIARVRMWVNLNLWQKLKLSRDDAKPLLRLKGFPSFPLVERQANEVDWWDMVCNVKKLINEKKEDGKVFWQNLAGYKRQEALRPYLSSEEDRKKGKKFARYQFGDLLLHLEKKHGEDWGKVYDEAWERIDKKVEGLSKHIKLEEERRSEDAQSKAALTDWLRAKASFVIEGLKEADKDEFCRCELKLQKWYGDLRGKPFAIEAENSILDISGFSKQYNCAFIWQKDGVKKLNLYLIINYFKGGKLRFKKIKPEAFEANRFYTVINKKSGEIVPMEVNFNFDDPNLIILPLAFGKRQGREFIWNDLLSLETGSLKLANGRVIEKTLYNRRTRQDEPALFVALTFERREVLDSSNIKPMNLIGIDRGENIPAVIALTDPEGCPLSRFKDSLGNPTHILRIGESYKEKQRTIQAKKEVEQRRAGGYSRKYASKAKNLADDMVRNTARDLLYYAVTQDAMLIFENLSRGFGRQGKRTFMAERQYTRMEDWLTAKLAYEGLSKTYLSKTLAQYTSKTCSNCGFTITSADYDRVLEKLKKTATGWMTTINGKELKVEGQITYYNRYKRQNVVKDLSVELDRLSEESVNNDISSWTKGRSGEALSLLKKRFSHRPVQEKFVCLNCGFETHADEQAALNIARSWLFLRSQEYKKYQTNKTTGNTDKRAFVETWQSFYRKKLKEVWKPAV

SEQ ID NO: 330 - protein, 976 aa, synthetic construct
  REGION 1..976: note = CasX variant
QEIKRINKIRRRLVKDSNTKKAGKTGPMKTLLVRVMTPDLRERLENLRKKPENIPQPISNTSRANLNKLLTDYTEMKKAILHVYWEEFQKDPVGLMSRVAQPAPKNIDQRKLIPVKDGNERLTSSGFACSQCCQPLYVYKLEQVNDKGKPHTNYFGRCNVSEHERLILLSPHKPEANDELVTYSLGKFGQRALDFYSIHVTKESTHPVKPLAQIAGNRYASGPVGKALSDACMGTIASFLSKYQDIIIEHQKVVKGNQKRLESLRELAGKENLEYPSVTLPPQPHTKEGVDAYNEVIARVRMWVNLNLWQKLKLSRDDAKPLLRLKGFPSFPLVERQANEVDWWDMVCNVKKLINEKKEDGKVFWQNLAGYKRQEALRPYLSSEEDRKKGKKFARYQLGDLLLHLEKKHGEDWGKVYDEAWERIDKKVEGLSKHIKLEEERRSEDAQSKAALTDWLRAKASFVIEGLKEADKDEFCRCELKLQKWYGDLRGKPFAIEAENSILDISGFSKQYNCAFIWQKDGVKKLNLYLIINYFKGGKLRFKKIKPEAFEANRFYTVINKKSGEIVPMEVNFNFDDPNLIILPLAFGKRQGREFIWNDLLSLETGSLKLANGRVIEKTLYNRRTRQDEPALFVALTFERREVLDSSNIKPMNLIGVDRGENIPAVIALTDPEGCPLSRFKDSLGNPTHILRIGESYKEKQRTIQAKKEVEQRRAGGYSRKYASKAKNLADDMVRNTARDLLYYAVTQDAMLIFENLSRGFGRQGKRTFMAERQYTRMEDWLTAKLAYEGLSKTYLSKTLAQYTSKTCSNCGFTITSADYDRVLEKLKKTATGWMTTINGKELKVEGQITYYNRRKRQNVVKDLSVELDRLSEESVNNDISSWTKGRSGEALSLLKKRFSHRPVQEKFVCLNCGFETHADEQAALNIARSWLFLRSQEYKKYQTNKTTGNTDKRAFVETWQSFYRKKLKEVWKPAV

SEQ ID NO: 331 - protein, 976 aa, synthetic construct
  REGION 1..976: note = CasX variant
QEIKRINKIRRRLVKDSNTKKAGKTGPMKTLLVRVMTPDLRERLENLRKKPENIPQPISNTSRANLNKLLTDYTEMKKAILHVYWEEFQKDPVGLMSRVAQPAPKNIDQRKLIPVKDGNERLTSSGFACSQCCQPLYVYKLEQVNDKGKPHTNYFGRCNVSEHERLILLSPHKPEANDELVTYSLGKFGQRALDFYSIHVTKESTHPVKPLAQIAGNRYASGPVGKALSDACMGTIASFLSKYQDIIIEHQKVVKGNQKRLESLRELAGKENLEYPSVTLPPQPHTKEGVDAYNEVIARVRMWVNLNLWQKLKLSRDDAKPLLRLKGFPSFPLVERQANEVDWWDMVCNVKKLINEKKEDGKVFWQNLAGYKRQEALRPYLSSEEDRKKGKKFARYQLGDLLKHLEKKHGEDWGKVYDEAWERIDKKVEGLSKHIKLEEERRSEDAQSKAALTDWLRAKASFVIEGLKEADKDEFCRCELKLQKWYGDLRGKPFAIEAENSILDISGFSKQYNCAFIWQKDGVKKLNLYLIINYFKGGKLRFKKIKPEAFEANRFYTVINKKSGEIVPMEVNFNFDDPNLIILPLAFGKRQGREFIWNDLLSLETGSLKLANGRVIEKTLYNRRTRQDEPALFVALTFERREVLDSSNIKPMNLIGVDRGENIPAVIALTDPEGCPLSRFKDSLGNPTHILRIGESYKEKQRTIQAKKEVEQRRAGGYSRKYASKAKNLADDMVRNTARDLLYYAVTQDAMLIFENLSRGFGRQGKRTFMAERQYTRMEDWLTAKLAYEGLSKTYLSKTLAQYTSKTCSNCGFTITSADYDRVLEKLKKTATGWMTTINGKELKVEGQITYYNRRKRQNVVKDLSVELDRLSEESVNNDISSWTKGRSGEALSLLKKRFSHRPVQEKFVCLNCGFETHADEQAALNIARSWLFLRSQEYKKYQTNKTTGNTDKRAFVETWQSFYRKKLKEVWKPAV

SEQ ID NO: 332 - protein, 976 aa, synthetic construct
  REGION 1..976: note = CasX variant
QEIKRINKIRRRLVKDSNTKKAGKTGPMKTLLVRVMTPDLRERLENLRKKPENIPQPISNTSRANLNKLLTDYTEMKKAILHVYWEEFQKDPVGLMSRVAQPAPKNIDQRKLIPVKDGNERLTSSGFACSQCCQPLYVYKLEQVNDKGKPHTNYFGRCNVSEHERLILLSPHKPEANDELVTYSLGKFGQRALDFYSIHVTKESTHPVKPLAQIAGNRYASGPVGKALSDACMGTIASFLSKYQDIIIEHQKVVKGNQKRLESLRELAGKENLEYPSVTLPPQPHTKEGVDAYNEVIARVRMWVNLNLWQKLKLSRDDAKPLLRLKGFPSFPLVERQANEVDWWDMVCNVKKLINEKKEDGKVFWQNLAGYKRQEALRPYLSSEEDRKKGKKFARYQLGDLLLHLEKKHGEDWGKVYDEAWERIDKKVEGLSKHIKLEEERRSEDAQSKAALTDWLRAKASFVIEGLKEADKDEFCRCELKLQKWYGDLRGKPFAIEAENSILDISGFSKQYNCAFIWQKDGVKKLNLYLIINYFKGGKLRFKKIKPEAFEANRFYTVINKKSGEIVPMEVNFNFDDPNLIILPLAFGKRQGREFIWNDLLSLETGSLKLANGRVIEKTLYNRRTRQDEPALFVALTFERREVLDSSNIKPMNLIGVDRGENIPAVIALTDPEGCPLSRFKDSLGNPTHILRIGESYKEKQRTIQAKKEVEQRRAGGYSRKYASKAKNLADDMVRNTARDLLYYAVTQDAMLIFENLSRGFGRQGKRTFMAERQYTRMEDWLTAKLAYEGLSKTYLSKTLAQYTSKTCSNCGFTITSADYDRVLEKLKKTATGWMTTINGKELKVEGQITYYNRYKRQNVVKDLSVELDRLSEESVNNDISSWTKGRSGEALSLLKKRFSHRPVQEKFVCLNCGFETHADEQAALNIARSWLFLRSQEYKKYQTNKTTGNTDKRAFVETWQSFYRKKLKEVWKPAV

SEQ ID NO: 333 - protein, 977 aa, synthetic construct; identical to SEQ ID NO: 89
  REGION 1..977: note = CasX variant

SEQ ID NO: 334 - protein, 977 aa, synthetic construct
  REGION 1..977: note = CasX variant
QEIKRINKIRRRLVKDSNTKKAGKTGPMKTLLVRVMTPDLRERLENLRKKPENIPQPISNTSRANLNKLLTDYTEMKKAILHVYWEEFQKDPVGLMSRVAQPASKKIDQNKLKPEMDEKGNLTTAGFACSQCGQPLFVYKLEQVSEKGKAYTNYFGRCNVAEHEKLILLAQLKPEKDSDEAVTYSLGKFGQRALDFYSIHVTKESTHPVKPLAQIAGNRYASGPVGKALSDACMGTIASFLSKYQDIIIEHQKVVKGNQKRLESLRELAGKENLEYPSVTLPPQPHTKEGVDAYNEVIARVRMWVNLNLWQKLKLSRDDAKPLLRLKGFPSFPLVERQANEVDWWDMVCNVKKLINEKKEDGKVFWQNLAGYKRQEALRPYLSSEEDRKKGKKFARYQLGDLLLHLEKKHGEDWGKVYDEAWERIDKKVEGLSKHIKLEEERRSEDAQSKAALTDWLRAKASFVIEGLKEADKDEFCRCELKLQKWYGDLRGKPFAIEAENSILDISGFSKQYNCAFIWQKDGVKKLNLYLIINYFKGGKLRFKKIKPEAFEANRFYTVINKKSGEIVPMEVNFNFDDPNLIILPLAFGKRQGREFIWNDLLSLETGSLKLANGRVIEKTLYNRRTRQDEPALFVALTFERREVLDSSNIKPMNLIGVDRGENIPAVIALTDPEGCPLSRFKDSLGNPTHILRIGESYKEKQRTIQAKKEVEQRRAGGYSRKYASKAKNLADDMVRNTARDLLYYAVTQDAMLIFENLSRGFGRQGKRTFMAERQYTRMEDWLTAKLAYEGLSKTYLSKTLAQYTSKTCSNCGFTITSADYDRVLEKLKKTATGWMTTINGKELKVEGQITYYNRRKRQNVVKDLSVELDRLSEESVNNDISSWTKGRSGEALSLLKKRFSHRPVQEKFVCLNCGFETHADEQAALNIARSWLFLRSQEYKKYQTNKTTGNTDKRAFVETWQSFYRKKLKEVWKPAV

SEQ ID NO: 335 - protein, 977 aa, synthetic construct
  REGION 1..977: note = CasX variant
QEIKRINKIRRRLVKDSNTKKAGKTGPMKTLLVRVMTPDLRERLENLRKKPENIPQPISNTSRANLNKLLTDYTEMKKAILHVYWEEFQKDPVGLMSRVAQPASKKIDQNKLKPEMDEKGNLTTAGFACSQCGQPLFVYKLEQVSEKGKAYTNYFGRCNVAEHEKLILLAQLKPEKDSDEAVTYSLGKFGQRALDFYSIHVTKESTHPVKPLAQIAGNRYASGPVGKALSDACMGTIASFLSKYQDIIIEHQKVVKGNQKRLESLRELAGKENLEYPSVTLPPQPHTKEGVDAYNEVIARVRMWVNLNLWQKLKLSRDDAKPLLRLKGFPSFPLVERQANEVDWWDMVCNVKKLINEKKEDGKVFWQNLAGYKRQEALRPYLSSEEDRKKGKKFARYQLGDLLKHLEKKHGEDWGKVYDEAWERIDKKVEGLSKHIKLEEERRSEDAQSKAALTDWLRAKASFVIEGLKEADKDEFCRCELKLQKWYGDLRGKPFAIEAENSILDISGFSKQYNCAFIWQKDGVKKLNLYLIINYFKGGKLRFKKIKPEAFEANRFYTVINKKSGEIVPMEVNFNFDDPNLIILPLAFGKRQGREFIWNDLLSLETGSLKLANGRVIEKTLYNRRTRQDEPALFVALTFERREVLDSSNIKPMNLIGVDRGENIPAVIALTDPEGCPLSRFKDSLGNPTHILRIGESYKEKQRTIQAKKEVEQRRAGGYSRKYASKAKNLADDMVRNTARDLLYYAVTQDAMLIFENLSRGFGRQGKRTFMAERQYTRMEDWLTAKLAYEGLSKTYLSKTLAQYTSKTCSNCGFTITSADYDRVLEKLKKTATGWMTTINGKELKVEGQITYYNRRKRQNVVKDLSVELDRLSEESVNNDISSWTKGRSGEALSLLKKRFSHRPVQEKFVCLNCGFETHADEQAALNIARSWLFLRSQEYKKYQTNKTTGNTDKRAFVETWQSFYRKKLKEVWKPAV

SEQ ID NO: 336 - protein, 977 aa, synthetic construct; identical to SEQ ID NO: 90
  REGION 1..977: note = CasX variant

SEQ ID NO: 337 - protein, 977 aa, synthetic construct
  REGION 1..977: note = CasX variant
QEIKRINKIRRRLVKDSNTKKAGKTGPMKTLLVRVMTPDLRERLENLRKKPENIPQPISNTSRANLNKLLTDYTEMKKAILHVYWEEFQKDPVGLMSRVAQPASKKIDQNKLKPEMDEKGNLTTAGFACSQCGQPLFVYKLEQVSEKGKAYTNYFGRCNVAEHEKLILLAQLKPEKDSDEAVTYSLGKFGQRALDFYSIHVTRESNHPVKPLEQIGGNSCASGPVGKALSDACMGAVASFLTKYQDIILEHQKVIKKNEKRLANLKDIASANGLAFPKITLPPQPHTKEGIEAYNNVVAQIVIWVNLNLWQKLKIGRDEAKPLQRLKGFPSFPLVERQANEVDWWDMVCNVKKLINEKKEDGKVFWQNLAGYKRQEALRPYLSSEEDRKKGKKFARYQLGDLLLHLEKKHGEDWGKVYDEAWERIDKKVEGLSKHIKLEEERRSEDAQSKAALTDWLRAKASFVIEGLKEADKDEFCRCELKLQKWYGDLRGKPFAIEAENSILDISGFSKQYNCAFIWQKDGVKKLNLYLIINYFKGGKLRFKKIKPEAFEANRFYTVINKKSGEIVPMEVNFNFDDPNLIILPLAFGKRQGREFIWNDLLSLETGSLKLANGRVIEKTLYNRRTRQDEPALFVALTFERREVLDSSNIKPMNLIGVDRGENIPAVIALTDPEGCPLSRFKDSLGNPTHILRIGESYKEKQRTIQAKKEVEQRRAGGYSRKYASKAKNLADDMVRNTARDLLYYAVTQDAMLIFENLSRGFGRQGKRTFMAERQYTRMEDWLTAKLAYEGLSKTYLSKTLAQYTSKTCSNCGFTITSADYDRVLEKLKKTATGWMTTINGKELKVEGQITYYNRYKRQNVVKDLSVELDRLSEESVNNDISSWTKGRSGEALSLLKKRFSHRPVQEKFVCLNCGFETHADEQAALNIARSWLFLRSQEYKKYQTNKTTGNTDKRAFVETWQSFYRKKLKEVWKPAV

SEQ ID NO: 338 - protein, 84 aa, unidentified
  REGION 1..84: note = chloroplast transit peptide
MASMISSSAVTTVSRASRGQSAAMAPFGGLKSMTGFPVRKVNTDITSITSNGGRVKCMQVWPPIGKKKFETLSYLPPLTRDSRA

SEQ ID NO: 339 - protein, 57 aa, unidentified
  REGION 1..57: note = chloroplast transit peptide
MASMISSSAVTTVSRASRGQSAAMAPFGGLKSMTGFPVRKVNTDITSITSNGGRVKS

SEQ ID NO: 340 - protein, 85 aa, unidentified
  REGION 1..85: note = chloroplast transit peptide
MASSMLSSATMVASPAQATMVAPFNGLKSSAAFPATRKANNDITSITSNGGRVNCMQVWPPIEKKKFETLSYLPDLTDSGGRVNC

SEQ ID NO: 341 - protein, 76 aa, unidentified
  REGION 1..76: note = chloroplast transit peptide
MAQVSRICNGVQNPSLISNLSKSSQRKSPLSVSLKTQQHPRAYPISSSWGLKKSGMTLIGSELRPLKVMSSVSTAC

SEQ ID NO: 342 - protein, 76 aa, unidentified
  REGION 1..76: note = chloroplast transit peptide
MAQVSRICNGVWNPSLISNLSKSSQRKSPLSVSLKTQQHPRAYPISSSWGLKKSGMTLIGSELRPLKVMSSVSTAC

SEQ ID NO: 343 - protein, 72 aa, unidentified
  REGION 1..72: note = chloroplast transit peptide
MAQINNMAQGIQTLNPNSNFHKPQVPKSSSFLVFGSKKLKNSANSMLVLKKDSIFMQLFCSFRISASVATAC

SEQ ID NO: 344 - protein, 69 aa, unidentified
  REGION 1..69: note = chloroplast transit peptide
MAALVTSQLATSGTVLSVTDRFRRPGFQGLRPRNPADAALGMRTVGASAAPKQSRKPHRFDRRCLSMVV

SEQ ID NO: 345 - protein, 77 aa, unidentified
  REGION 1..77: note = chloroplast transit peptide
MAALTTSQLATSATGFGIADRSAPSSLLRHGFQGLKPRSPAGGDATSLSVTTSARATPKQQRSVQRGSRRFPSVVVC

SEQ ID NO: 346 - protein, 57 aa, unidentified
  REGION 1..57: note = chloroplast transit peptide
MASSVLSSAAVATRSNVAQANMVAPFTGLKSAASFPVSRKQNLDITSIASNGGRVQC

SEQ ID NO: 347 - protein, 65 aa, unidentified
  REGION 1..65: note = chloroplast transit peptide
MESLAATSVFAPSRVAVPAARALVRAGTVVPTRRTSSTSGTSGVKCSAAVTPQASPVISRSAAAA

SEQ ID NO: 348 - protein, 72 aa, unidentified
  REGION 1..72: note = chloroplast transit peptide
MGAAATSMQSLKFSNRLVPPSRRLSPVPNNVTCNNLPKSAAPVRTVKCCASSWNSTINGAAATTNGASAASS

SEQ ID NO: 349 - protein, 20 aa, unidentified
  REGION 1..20: note = endosomal escape peptide
  VARIANT 4: note = K, H or R
  VARIANT 8: note = K, H or R
  VARIANT 11: note = K, H or R
  VARIANT 15: note = K, H or R
  VARIANT 19: note = K, H or R
GLFXALLXLLXSLWXLLLXA

SEQ ID NO: 350 - protein, 20 aa, unidentified
  REGION 1..20: note = endosomal escape peptide
GLFHALLHLLHSLWHLLLHA

SEQ ID NO: 351 - protein, 9 aa, unidentified
  REGION 1..9: note = endosomal escape peptide
HHHHHHHHH

SEQ ID NO: 352 - protein, 7 aa, Betapolyomavirus macaca mulatta polyomavirus 1
PKKKRKV

SEQ ID NO: 353 - protein, 16 aa, unidentified
  REGION 1..16: note = nuclear localization signal
KRPAATKKAGQAKKKK

SEQ ID NO: 354 - protein, 9 aa, Homo sapiens
PAAKRVKLD

SEQ ID NO: 355 - protein, 11 aa, Homo sapiens
RQRRNELKRSP

SEQ ID NO: 356 - protein, 38 aa, unidentified
  REGION 1..38: note = nuclear localization signal
NQSSNFGPMKGGNFGGRSSGPYGGGGQYFAKPRNQGGY

SEQ ID NO: 357 - protein, 42 aa, unidentified
  REGION 1..42: note = nuclear localization signal
RMRIZFKNKGKDTAELRRRRVEVSVELRKAKKDEQILKRRNV

SEQ ID NO: 358 - protein, 8 aa, unidentified
  REGION 1..8: note = nuclear localization signal
VSRKRPRP

SEQ ID NO: 359 - protein, 8 aa, unidentified
  REGION 1..8: note = nuclear localization signal
PPKKARED

SEQ ID NO: 360 - protein, 8 aa, Homo sapiens
PQPKKKPL

SEQ ID NO: 361 - protein, 12 aa, Mus musculus
SALIKKKKKMAP

SEQ ID NO: 362 - protein, 5 aa, Alphainfluenzavirus influenza A virus
DRLRR

SEQ ID NO: 363 - protein, 7 aa, Alphainfluenzavirus influenza A virus
PKQKKRK

SEQ ID NO: 364 - protein, 10 aa, Deltavirushepatitis delta virus
RKLKKKIKKL

SEQ ID NO: 365 - protein, 10 aa, Mus musculus
REKKKFLKRR

SEQ ID NO: 366 - protein, 20 aa, Homo sapiens
KRKGDEVDGVDEVAKKKSKK

SEQ ID NO: 367 - protein, 17 aa, Homo sapiens
RKCLQAGMNLEARKTKK

SEQ ID NO: 368 - protein, 8 aa, Orthobornavirus mammalian 1 orthobornavirus
PRPRKIPR

SEQ ID NO: 369 - protein, 9 aa, Hepacivirushepacivirus C
PPRKKRTVV

SEQ ID NO: 370 - protein, 12 aa, unidentified
  REGION 1..12: note = nuclear localization signal
NLSKKKKRKREK

SEQ ID NO: 371 - protein, 10 aa, unidentified
  REGION 1..10: note = nuclear localization signal
RRPSRPFRKP

SEQ ID NO: 372 - protein, 8 aa, Lymphocryptovirus human gammaherpesvirus 4
KRPRSPSS

SEQ ID NO: 373 - protein, 19 aa, Alphainfluenzavirus influenza A virus
KRGINDRNFWRGENERKTR

SEQ ID NO: 374 - protein, 11 aa, Homo sapiens
PRPPKMARYDN

SEQ ID NO: 375 - protein, 8 aa, unidentified
  REGION 1..8: note = nuclear localization signal
KRSFSKAF

SEQ ID NO: 376 - protein, 9 aa, unidentified
  REGION 1..9: note = nuclear localization signal
KLKIKRPVK

SEQ ID NO: 377 - protein, 19 aa, unidentified
  REGION 1..19: note = nuclear localization signal
PKKKRKVPPPPAAKRVKLD

SEQ ID NO: 378 - protein, 17 aa, Deltaretrovirus human T-lymphotropic virus 1
PKTRRRPRRSQRKRPPT

SEQ ID NO: 379 - protein, 24 aa, Caenorhabditis elegans
SRRRKANPTKLSENAKKLAKEVEN

SEQ ID NO: 380 - protein, 16 aa, unidentified
  REGION 1..16: note = nuclear localization signal
KTRRRPRRSQRKRPPT

SEQ ID NO: 381 - protein, 13 aa, unidentified
  REGION 1..13: note = nuclear localization signal
RRKKRRPRRKKRR

SEQ ID NO: 382 - protein, 14 aa, unidentified
  REGION 1..14: note = nuclear localization signal
PKKKSRKPKKKSRK

SEQ ID NO: 383 - protein, 17 aa, unidentified
  REGION 1..17: note = nuclear localization signal
HKKKHPDASVNFSEFSK

SEQ ID NO: 384 - protein, 18 aa, unidentified
  REGION 1..18: note = nuclear localization signal
QRPGPYDRPQRPGPYDRP

SEQ ID NO: 385 - protein, 16 aa, unidentified
  REGION 1..16: note = nuclear localization signal
LSPSLSPLLSPSLSPL

SEQ ID NO: 386 - protein, 18 aa, unidentified
  REGION 1..18: note = nuclear localization signal
RGKGGKGLGKGGAKRHRK

SEQ ID NO: 387 - protein, 14 aa, unidentified
  REGION 1..14: note = nuclear localization signal
PKRGRGRPKRGRGR

SEQ ID NO: 388 - protein, 19 aa, unidentified
  REGION 1..19: note = nuclear localization signal
PKKKRKVPPPPAAKRVKLD

SEQ ID NO: 389 - protein, 17 aa, unidentified
  REGION 1..17: note = nuclear localization signal
PKKKRKVPPPPKKKRKV

SEQ ID NO: 390 - protein, 11 aa, Lentivirus human immunodeficiency virus
YGRKKRRQRRR

SEQ ID NO: 391 - protein, 8 aa, Lentivirus human immunodeficiency virus
RKKRRQRR

SEQ ID NO: 392 - protein, 11 aa, Lentivirus human immunodeficiency virus
YARAAARQARA

SEQ ID NO: 393 - protein, 11 aa, Lentivirus human immunodeficiency virus
THRLPRRRRRR

SEQ ID NO: 394 - protein, 11 aa, Lentivirus human immunodeficiency virus
GGRRARRRRRR

SEQ ID NO: 395 - protein, 12 aa, unidentified
  REGION 1..12: note = peptide transduction domain
RRQRRTSKLMKR

SEQ ID NO: 396 - protein, 27 aa, unidentified
  REGION 1..27: note = peptide transduction domain
GWTLNSAGYLLGKINLKALAALAKKIL

SEQ ID NO: 397 - protein, 33 aa, unidentified
  REGION 1..33: note = peptide transduction domain
KALAWEAKLAKALAKALAKHLAKALAKALKCEA

SEQ ID NO: 398 - protein, 16 aa, Drosophila melanogaster
RQIKIWFQNRRMKWKK

SEQ ID NO: 399 - protein, 25 aa, synthetic construct
  REGION 1..25: note = linker polypeptide
  VARIANT 6..10: note = grouped amino acid residues may be present or absent
  VARIANT 11..15: note = grouped amino acid residues may be present or absent
  VARIANT 16..20: note = grouped amino acid residues may be present or absent
  VARIANT 21..25: note = grouped amino acid residues may be present or absent
GSGGSGSGGSGSGGSGSGGSGSGGS

SEQ ID NO: 400 - protein, 30 aa, synthetic construct
  REGION 1..30: note = linker polypeptide
  VARIANT 7..12: note = grouped amino acid residues may be present or absent
  VARIANT 13..18: note = grouped amino acid residues may be present or absent
  VARIANT 19..24: note = grouped amino acid residues may be present or absent
  VARIANT 25..30: note = grouped amino acid residues may be present or absent
GGSGGSGGSGGSGGSGGSGGSGGSGGSGGS

SEQ ID NO: 401 - protein, 20 aa, synthetic construct
  REGION 1..20: note = linker polypeptide
  VARIANT 5..8: note = grouped amino acid residues may be present or absent
  VARIANT 9..12: note = grouped amino acid residues may be present or absent
  VARIANT 13..16: note = grouped amino acid residues may be present or absent
  VARIANT 17..20: note = grouped amino acid residues may be present or absent
GGGSGGGSGGGSGGGSGGGS

SEQ ID NO: 402 - protein, 4 aa, synthetic construct
  REGION 1..4: note = linker polypeptide
GGSG

SEQ ID NO: 403 - protein, 5 aa, synthetic construct
  REGION 1..5: note = linker polypeptide
GGSGG

SEQ ID NO: 404 - protein, 5 aa, synthetic construct
  REGION 1..5: note = linker polypeptide
GSGSG

SEQ ID NO: 405 - protein, 5 aa, synthetic construct
  REGION 1..5: note = linker polypeptide
GSGGG

SEQ ID NO: 406 - protein, 5 aa, synthetic construct
  REGION 1..5: note = linker polypeptide
GGGSG

SEQ ID NO: 407 - protein, 5 aa, synthetic construct
  REGION 1..5: note = linker polypeptide
GSSSG

SEQ ID NO: 408 - protein, 4 aa, synthetic construct
  REGION 1..4: note = linker polypeptide
GPGP

SEQ ID NO: 409 - protein, 6 aa, synthetic construct
  REGION 1..6: note = linker polypeptide
PPAPPA

SEQ ID NO: 410 - protein, 7 aa, synthetic construct
  REGION 1..7: note = linker polypeptide
PPPGPPP

SEQ ID NO: 411 - protein, 978 aa, synthetic construct
  REGION 1..978: note = CasX variant
MQEIKRINKIRRRLVKDSNTKKAGKTGPMKTLLVRVMTPDLRERLENLRKKPENIPQPISNTSRANLNKLLTDYTEMKKAILHVYWEEFQKDPVGLMSRVAQPAPKNIDQRKLIPVKDGNERLTSSGFACSQCCQPLYVYKLEQVNDKGKPHTNYFGRCNVSEHERLILLSPHKPEANDELVTYSLGKFGQRALDFYSIHVTRESNHPVKPLEQIGGNSCASGPVGKALSDACMGAVASFLTKYQDIILEHQKVIKKNEKRLANLKDIASANGLAFPKITLPPQPHTKEGIEAYNNVVAQIVIWVNLNLWQKLKIGRDEAKPLQRLKGFPSFPLVERQANEVDWWDMVCNVKKLINEKKEDGKVFWQNLAGYKRQEALLPYLSSEEDRKKGKKFARYQFGDLLLHLEKKHGEDWGKVYDEAWERIDKKVEGLSKHIKLEEERRSEDAQSKAALTDWLRAKASFVIEGLKEADKDEFCRCELKLQKWYGDLRGKPFAIEAENSILDISGFSKQYNCAFIWQKDGVKKLNLYLIINYFKGGKLRFKKIKPEAFEANRFYTVINKKSGEIVPMEVNFNFDDPNLIILPLAFGKRQGREFIWNDLLSLETGSLKLANGRVIEKTLYNRRTRQDEPALFVALTFERREVLDSSNIKPMNLIGIDRGENIPAVIALTDPEGCPLSRFKDSLGNPTHILRIGESYKEKQRTIQAAKEVEQRRAGGYSRKYASKAKNLADDMVRNTARDLLYYAVTQDAMLIFENLSRGFGRQGKRTFMAERQYTRMEDWLTAKLAYEGLPSKTYLSKTLAQYTSKTCSNCGFTITSADYDRVLEKLKKTATGWMTTINGKELKVEGQITYYNRYKRQNVVKDLGVELDRLSEESVNNDISSWTKGRSGEALSLLKKRFSHRPVQEKFVCLNCGFETHADEQAALNIARSWLFLRSQEYKKYQTNKTTGNTDKRAFVETWQSFYRKKLKEVWKPAV

SEQ ID NO: 412 - protein, 986 aa, synthetic construct; identical to SEQ ID NO: 254
  REGION 1..986: note = CasX variant

SEQ ID NO: 413 - protein, 978 aa, synthetic construct
  REGION 1..978: note = CasX variant
MQEIKRINKIRRRLVKDSNTKKAGKTGPMKTLLVRVMTPDLRERLENLRKKPENIPQPISNTSRANLNKLLTDYTEMKKAILHVYWEEFQKDPVGLMSRVAQPAPKNIDQRKLIPVKDGNERLTSSGFACSQCCQPLYVYKLEQVNDKGKPHTNYFGRCNVSEHERLILLSPHKPEANDELVTYSLGKFGQRALDFYSIHVTRESNHPVKPLEQIGGNSCASGPVGKALSDACMGAVASFLTKYQDIILEHQKVIKKNEKRLANLKDIASANGLAFPKITLPPQPHTKEGIEAYNNVVAQIVIWVNLNLWQKLKIGRDEAKPLQRLKGFPSFPLVERQANEVDWWDMVCNVKKLINEKKEDGKVFWQNLAGYKRQEALRPYLSSEEDRKKGKKFARYQFGDLLLHLEKKHGEDWGKVYDEAWERIDKKVEGLSKHIKLEEERRSEDAQSKAALTDWLRAKASFVIEGLKEADKDEFCRCELKLQKWYGDLRGKPFAIEAENSILDISGFSKQYNCAFIWQKDGVKKLNLYLIINYFKGGKLRFKKIKPEAFEANRFYTVINKKSGEIVPMEVNFNFDDPNLIILPLAFGKRQGREFIWNDLLSLETGSLKLANGRVIEKTLYNRRTRQDEPALFVALTFERREVLDSSNIKPVNLIGVDRGENIPAVIALTDPEGCPLPEFKDSSGGPTDILRIGEGYKEKQRAIQAAKEVEQRRAGGYSRKFASKSRNLADDMVRNSARDLFYHAVTHDAVLVFENLSRGFGRQGKRTFMTERQYTKMEDWLTAKLAYEGLTSKTYLSKTLAQYTSKTCSNCGFTITSADYDRVLEKLKKTATGWMTTINGKELKVEGQITYYNRYKRQNVVKDLSVELDRLSEESVNNDISSWTKGRSGEALSLLKKRFSHRPVQEKFVCLNCGFETHADEQAALNIARSWLFLRSQEYKKYQTNKTTGNTDKRAFVETWQSFYRKKLKEVWKPAV

SEQ ID NO: 414 - protein, 972 aa, synthetic construct
  REGION 1..972: note = CasX variant
MQEIKRINKIRRRLVKDSNTKKAGKTGPMKTLLVRVMTPDLRERLENLRKKPENIPQPISNTSRANLNKLLTDYTEMKKAILHVYWEEFQKDPVGLMSRVAQPAPKNIDQRKLIPVKDGNERLTSSGFACSQCCQPLYVYKLEQVNDKGKPHTNYFGRCNVSEHERLILLSPHKPEANDELVTYSLGKFGQRALDFYSIHVTRESNHPVKPLEQIGGNSCASGPVGKALSDACMGAVASFLTKYQDIILEHQKVIKKNEKRLANLKDIASANGLAFPKITLPPQPHTKEGIEAYNNVVAQIVIWVNLNLWQKLKIGRDEAKPLQRLKGFPSFPLVERQANEVDWWDMVCNVKKLINEKKEDGKVFWQNLAGYKRQEALRPYLSSEEDRKKGKKFARYQFGDLLLHLEKKHGEDWGKVYDEAWERIDKKVEGLSKHIKLEEERRSEDAQSKAALTDWLRAKASFVIEGLKEADKDEFCRCELKLQKWYGDLRGKPFAIEAENSILDISGFSKQYNCAFIWQKDGVKKLNLYLIINYFKGGKLRFKKIKPEAFEANRFYTVINKKSGEIVPMEVNFNFDDPNLIILPLAFGKRQGREFIWNDLLSLETGSLKLANGRVIEKTLYNRRTRQDEPALFVALTFERREVLDSSNIKPMNLIGIDRGENIPAVIALTDPEGCPLSRFKDSLGNPTHILRIGESYKEKQRTIQAKKEVEQRRAGGYSRKYASKAKNLADDMVRNTARDLLYYAVTQDAMLIFENLSRGFGRQGKRTFMAERQYTRMEDWLTAKLAYEGLSKTYLSKTLAQYTSKTCSNCGFTITSADYDRVLEKLKKTATGWMTTINGKELKVEGQITYYNRYKRQNVVKDLSVELDRLSEESVNNDISSWTKGRSGEALSLLKKRFSHRPVQEKFVCLNCGFETHADEQAALNIARSWLFLNSNSTEFKSYKSGKQPFVGAWQAFYKRRLKEVWKPNA

SEQ ID NO: 415 - protein, 978 aa, synthetic construct
  REGION 1..978: note = CasX variant
QEIKRINKIRRRLVKDSNTKKAGKTGPMKTLLVRVMTPDLRERLENLRKKPENIPQPISNTSRANLNKLLTDYTEMKKAILHVYWEEFQKDPVGLMSRVAQPASKKIDQNKLKPEMDEKGNLTTAGFACSQCGQPLFVYKLEQVSEKGKAYTNYFGRCNVAEHEKLILLAQLKPEKDSDEAVTYSLGKFGQRALDFYSIHVTKESTHPVKPLAQIAGNRYASGPVGKALSDACMGTIASFLSKYQDIIIEHQKVVKGNQKRLESLRELAGKENLEYPSVTLPPQPHTKEGVDAYNEVIARVRMWVNLNLWQKLKLSRDDAKPLLRLKGFPSFPLVERQANEVDWWDMVCNVKKLINEKKEDGKVFWQNLAGYKRQEALRPYLSSEEDRKKGKKFARYQLGDLLLHLEKKHGEDWGKVYDEAWERIDKKVEGLSKHIKLEEERRSEDAQSKAALTDWLRAKASFVIEGLKEADKDEFCRCELKLQKWYGDLRGKPFAIEAENSILDISGFSKQYNCAFIWQKDGVKKLNLYLIINYFKGGKLRFKKIKPEAFEANRFYTVINKKSGEIVPMEVNFNFDDPNLIILPLAFGKRQGREFIWNDLLSLETGSLKLANGRVIEKTLYNRRTRQDEPALFVALTFERREVLDSSNIKPMNLIGVDRGENIPAVIALTDPEGCPLSRFKDSLGNPTHILRIGESYKEKQRTIQAKKEVEQRRAGGYSRKYASKAKNLADDMVRNTARDLLYYAVTQDAMLIFENLSRGFGRQGKRTFMAERQYTRMEDWLTAKLAYEGLSKTYLSKTLAQYTSKTCSNCGFTIHTSADYDRVLEKLKKTATGWMTTINGKELKVEGQITYYNRYKRQNVVKDLSVELDRLSEESVNNDISSWTKGRSGEALSLLKKRFSHRPVQEKFVCLNCGFETHADEQAALNIARSWLFLRSQEYKKYQTNKTTGNTDKRAFVETWQSFYRKKLKEVWKPAV

SEQ ID NO: 416 - protein, 978 aa, synthetic construct; identical to SEQ ID NO: 91
  REGION 1..978: note = CasX variant

SEQ ID NO: 417 - protein, 977 aa, synthetic construct
  REGION 1..977: note = CasX variant
QEIKRINKIRRRLVKDSNTKKAGKTGPMKTLLVRVMTPDLRERLENLRKKPENIPQPISNTSRANLNKLLTDYTEMKKAILHVYWEEFQKDPVGLMSRVAQPASKKIDQNKLKPEMDEKGNLTTAGFACSQCGQPLFVYKLEQVSEKGKAYTNYFGRCNVAEHEKLILLAQLKPEKDSDEAVTYSLGKFGQRALDFYSIHVTKESTHPVKPLAQIAGNRYASGPVGKALSDACMGTIASFLSKYQDIIIEHQKVVKGNQKRLESLRELAGKENLEYPSVTLPPQPHTKEGVDAYNEVIARVRMWVNHNLWQKLKLSRDDAKPLLRLKGFPSFPLVERQANEVDWWDMVCNVKKLINEKKEDGKVFWQNLAGYKRQEALRPYLSSEEDRKKGKKFARYQLGDLLLHLEKKHGEDWGKVYDEAWERIDKKVEGLSKHIKLEEERRSEDAQSKAALTDWLRAKASFVIEGLKEADKDEFCRCELKLQKWYGDLRGKPFAIEAENSILDISGFSKQYNCAFIWQKDGVKKLNLYLIINYFKGGKLRFKKIKPEAFEANRFYTVINKKSGEIVPMEVNFNFDDPNLIILPLAFGKRQGREFIWNDLLSLETGSLKLANGRVIEKTLYNRRTRQDEPALFVALTFERREVLDSSNIKPMNLIGVDRGENIPAVIALTDPEGCPLSRFKDSLGNPTHILRIGESYKEKQRTIQAKKEVEQRRAGGYSRKYASKAKNLADDMVRNTARDLLYYAVTQDAMLIFENLSRGFGRQGKRTFMAERQYTRMEDWLTAKLAYEGLSKTYLSKTLAQYTSKTCSNCGFTITSADYDRVLEKLKKTATGWMTTINGKELKVEGQITYYNRYKRQNVVKDLSVELDRLSEESVNNDISSWTKGRSGEALSLLKKRFSHRPVQEKFVCLNCGFETHADEQAALNIARSWLFLRSQEYKKYQTNKTTGNTDKRAFVETWQSFYRKKLKEVWKPAV

SEQ ID NO: 418 - protein, 978 aa, synthetic construct
  REGION 1..978: note = CasX variant
QEIKRINKIRRRLVKDSNTKKAGKTGPMKTLLVRVMTPDLRERLENLRKKPENIPQPISNTSRANLNKLLTDYTEMKKAILHVYWEEFQKDPVGLMSRVAQPASKKIDQNKLKPEMDEKGNLTTAGFACSQCGQPLFVYKLEQVSEKGKAYTNYFGRCNVAEHEKLILLAQLKPEKDSDEAVTYSLGKFGQRALDFYSIHVTKESTHPVKPLAQIAGNRYASGAPVGKALSDACMGTIASFLSKYQDIIIEHQKVVKGNQKRLESLRELAGKENLEYPSVTLPPQPHTKEGVDAYNEVIARVRMWVNLNLWQKLKLSRDDAKPLLRLKGFPSFPLVERQANEVDWWDMVCNVKKLINEKKEDGKVFWQNLAGYKRQEALRPYLSSEEDRKKGKKFARYQLGDLLLHLEKKHGEDWGKVYDEAWERIDKKVEGLSKHIKLEEERRSEDAQSKAALTDWLRAKASFVIEGLKEADKDEFCRCELKLQKWYGDLRGKPFAIEAENSILDISGFSKQYNCAFIWQKDGVKKLNLYLIINYFKGGKLRFKKIKPEAFEANRFYTVINKKSGEIVPMEVNFNFDDPNLIILPLAFGKRQGREFIWNDLLSLETGSLKLANGRVIEKTLYNRRTRQDEPALFVALTFERREVLDSSNIKPMNLIGVDRGENIPAVIALTDPEGCPLSRFKDSLGNPTHILRIGESYKEKQRTIQAKKEVEQRRAGGYSRKYASKAKNLADDMVRNTARDLLYYAVTQDAMLIFENLSRGFGRQGKRTFMAERQYTRMEDWLTAKLAYEGLSKTYLSKTLAQYTSKTCSNCGFTITSADYDRVLEKLKKTATGWMTTINGKELKVEGQITYYNRYKRQNVVKDLSVELDRLSEESVNNDISSWTKGRSGEALSLLKKRFSHRPVQEKFVCLNCGFETHADEQAALNIARSWLFLRSQEYKKYQTNKTTGNTDKRAFVETWQSFYRKKLKEVWKPAV

SEQ ID NO: 419 - protein, 979 aa, synthetic construct
  REGION 1..979: note = CasX variant
RQEIKRINKIRRRLVKDSNTKKAGKTGPMKTLLVRVMTPDLRERLENLRKKPENIPQPISNTSRANLNKLLTDYTEMKKAILHVYWEEFQKDPVGLMSRVAQPASKKIDQNKLKPEMDEKGNLTTAGFACSQCGQPLFVYKLEQVSEKGKAYTNYFGRCNVAEHEKLILLAQLKPEKDSDEAVTYSLGKFGQRALDFYSIHVTKESTHPVKPLAQIAGNRYASGAPVGKALSDACMGTIASFLSKYQDIIIEHQKVVKGNQKRLESLRELAGKENLEYPSVTLPPQPHTKEGVDAYNEVIARVRMWVNLNLWQKLKLSRDDAKPLLRLKGFPSFPLVERQANEVDWWDMVCNVKKLINEKKEDGKVFWQNLAGYKRQEALRPYLSSEEDRKKGKKFARYQLGDLLLHLEKKHGEDWGKVYDEAWERIDKKVEGLSKHIKLEEERRSEDAQSKAALTDWLRAKASFVIEGLKEADKDEFCRCELKLQKWYGDLRGKPFAIEAENSILDISGFSKQYNCAFIWQKDGVKKLNLYLIINYFKGGKLRFKKIKPEAFEANRFYTVINKKSGEIVPMEVNFNFDDPNLIILPLAFGKRQGREFIWNDLLSLETGSLKLANGRVIEKTLYNRRTRQDEPALFVALTFERREVLDSSNIKPMNLIGVDRGENIPAVIALTDPEGCPLSRFKDSLGNPTHILRIGESYKEKQRTIQAKKEVEQRRAGGYSRKYASKAKNLADDMVRNTARDLLYYAVTQDAMLIFENLSRGFGRQGKRTFMAERQYTRMEDWLTAKLAYEGLSKTYLSKTLAQYTSKTCSNCGFTITSADYDRVLEKLKKTATGWMTTINGKELKVEGQITYYNRYKRQNVVKDLSVELDRLSEESVNNDISSWTKGRSGEALSLLKKRFSHRPVQEKFVCLNCGFETHADEQAALNIARSWLFLRSQEYKKYQTNKTTGNTDKRAFVETWQSFYRKKLKEVWKPAV

SEQ ID NO: 420 - protein, 978 aa, synthetic construct
  REGION 1..978: note = CasX variant
QEIKRINKIRRRLVKDSNTKKAGKTGPMKTLLVRVMTPDLRERLENLRKKPENIPQPISNTSRANLNKLLTDYTEMKKAILHVYWEEFQKDPVGLMSRVAQPASKKIDQNKLKPEMDEKGNLTTAGFACSQCGQPLFVYKLEQVSEKGKAYTNYFGRCNVAEHEKLILLAQLKPEKDSDEAVTYSLGKFGQRALDFYSIHVTKESTHPVKPLAQIAGNRYASGPVGKALSDACMGTIASFLSKYQDIIIEHQKVVKGNQKRLESLRELAGKENLEYPSVTLPPQPHTKEGVDAYNEVIARVRMWVNLNLWQKLKLSRDDAKPLLRLKGFPSFPLVERQANEVDWWDMVCNVKKLINEKKEDGKVFWQNLAGYKRQEALRPYLSSEEDRKKGKKFARYQLGDLLLHLEKKHGEDWGKVYDEAWERIDKKVEGLSKHIKLEEERRSEDAQSKAALTDWLRAKASFVIEGLKEADKDEFCRCELKLQKWYGDLRGKPFAIEAENSILDISGFSKQYNCAFIWQKDGVKKLNLYLIINYFKGGKLRFKKIKPEAFEANRFYTVINKKSGEIVPMEVNFNFDDPNLIILPLAFGKRQGREFIWNDLLSLETGSLKLANGRVIEKTLYNRRTRQDEPALFVALTFERREVLDSSNIKPMNLIGVDRGENIPAVIALTDPEGCPLSRFKDSLGNPTHIQLRIGESYKEKQRTIQAKKEVEQRRAGGYSRKYASKAKNLADDMVRNTARDLLYYAVTQDAMLIFENLSRGFGRQGKRTFMAERQYTRMEDWLTAKLAYEGLSKTYLSKTLAQYTSKTCSNCGFTITSADYDRVLEKLKKTATGWMTTINGKELKVEGQITYYNRYKRQNVVKDLSVELDRLSEESVNNDISSWTKGRSGEALSLLKKRFSHRPVQEKFVCLNCGFETHADEQAALNIARSWLFLRSQEYKKYQTNKTTGNTDKRAFVETWQSFYRKKLKEVWKPAV

SEQ ID NO: 421 - protein, 977 aa, synthetic construct
  REGION 1..977: note = CasX variant
QEIKRINKIRRRLVKDSNTKKAGKTGPMKTLLVRVMTPDLRERLENLRKKPENIPQPISNTSRANLNKLLTDYTEMKKAILHVYWEEFQKDPVGLMSRVAQPASKKIDQNKLKPEMDEKGNLTTAGFACSQCGQPLFVYKLEQVSEKGKAYTNYFGRCNVAEHEKLILLAQLKPEKDSDEAVTYSLGKFGQRALDFYSIHVTKESTHPVKPLAQIAGNRYASGPVGKALSDACMGTIASFLSKYQDIIIEHQKVVKGNQKRLESLRELAGKENLEYPSVTLPPQPHTKEGVDAYNEVIARVRMWVNLNLWQKLKLSRDDAKPLLRLKGFPSFPLVERQANEVDWWDMVCNVKKLINEKKEDGKVFWQNLAGYKRQEALRPYLSSEEDRKKGKKFARYQLGDLLLHLEKKHGEDWGKVYDEAWERIDKKVEGLSKHIKLEEERRSEDAQSKAALTDWLRAKASFVIEGLKEADKDEFCRCELKLQKWYGDLRGKPFAIEAENSILDISGFSKQYNCAFIWQKDGVKKLNLYLIINYFKGGKLRFKKIKPEAFEANRFYTVINKKSGEIVPMEVNFNFDDPNLIILPLAFGKRQGREFIWNDLLSLETGSLKLANGRVIEKTLYNRRTRQDEPALFVALTFERREVLDSSNIKPMNLIGVDRGENIPAVIALTDPEGCPLSRFKDSLGNPTHILRIGESYKEKQRTTQAKKEVEQRRAGGYSRKYASKAKNLADDMVRNTARDLLYYAVTQDAMLIFENLSRGFGRQGKRTFMAERQYTRMEDWLTAKLAYEGLSKTYLSKTLAQYTSKTCSNCGFTITSADYDRVLEKLKKTATGWMTTINGKELKVEGQITYYNRYKRQNVVKDLSVELDRLSEESVNNDISSWTKGRSGEALSLLKKRFSHRPVQEKFVCLNCGFETHADEQAALNIARSWLFLRSQEYKKYQTNKTTGNTDKRAFVETWQSFYRKKLKEVWKPAV

SEQ ID NO: 422 - protein, 977 aa, synthetic construct
  REGION 1..977: note = CasX variant
QEIKRINKIRRRLVKDSNTKKAGKTGPMKTLLVRVMTPDLRERLENLRKKPENIPQPISNTSRANLNKLLTDYTEMKKAILHVYWEEFQKDPVGLMSRVAQPASKKIDQNKLKPEMDEKGNLTTAGFACSQCGQPLFVYKLEQVSEKGKAYTNYFGRCNVAEHEKLILLAQLKPEKDSDEAVTYSLGKFGQRALDFYSIHVTKESTHPVKPLAQIAGNRYASGPVGKALSDACMGTIASFLSKYQDIIIEHQKVVKGNQKRLESLRELAGKENLEYPSVTLPPQPHTKEGVDAYNEVIARVRMWVNLNLWQKLKLSRDDAKPLLRLKGFPSFPLVERQANEVDWWDMVCNVKKLINEKKEDGKVFWQNLAGYKRQEALRPYLSSEEDRKKGKKFARYQLGDLLLHLEKKHGEDWGKVYDEAWERIDKKVEGLSKHIKLEEERRSEDAQSKAALTDWLRAKASFVIEGLKEADKDEFCRCELKLQKWYGDLRGKPFAIEAENSILDISGFSKQYNCAFIWQKDGVKKLNLYLIINYFKGGKLRFKKIKPEAFEANRFYTVINKKSGEIVPMEVNFNFDDPNLIILPLAFGKRQGREFIWNDLLSLETGSLKLANGRVIEKTLYNRRTRQDEPALFVALTFERREVLDSSNIKPMNLIGVDRGENIPAVIALTDPEGCPLSRFKRSLGNPTHILRIGESYKEKQRTIQAKKEVEQRRAGGYSRKYASKAKNLADDMVRNTARDLLYYAVTQDAMLIFENLSRGFGRQGKRTFMAERQYTRMEDWLTAKLAYEGLSKTYLSKTLAQYTSKTCSNCGFTITSADYDRVLEKLKKTATGWMTTINGKELKVEGQITYYNRYKRQNVVKDLSVELDRLSEESVNNDISSWTKGRSGEALSLLKKRFSHRPVQEKFVCLNCGFETHADEQAALNIARSWLFLRSQEYKKYQTNKTTGNTDKRAFVETWQSFYRKKLKEVWKPAV

SEQ ID NO: 423 - protein, 977 aa, synthetic construct
  REGION 1..977: note = CasX variant
QEIKRINKIRRRLVKDSNTKKAGKTYPMKTLLVRVMTPDLRERLENLRKKPENIPQPISNTSRANLNKLLTDYTEMKKAILHVYWEEFQKDPVGLMSRVAQPASKKIDQNKLKPEMDEKGNLTTAGFACSQCGQPLFVYKLEQVSEKGKAYTNYFGRCNVAEHEKLILLAQLKPEKDSDEAVTYSLGKFGQRALDFYSIHVTKESTHPVKPLAQIAGNRYASGPVGKALSDACMGTIASFLSKYQDIIIEHQKVVKGNQKRLESLRELAGKENLEYPSVTLPPQPHTKEGVDAYNEVIARVRMWVNLNLWQKLKLSRDDAKPLLRLKGFPSFPLVERQANEVDWWDMVCNVKKLINEKKEDGKVFWQNLAGYKRQEALRPYLSSEEDRKKGKKFARYQLGDLLLHLEKKHGEDWGKVYDEAWERIDKKVEGLSKHIKLEEERRSEDAQSKAALTDWLRAKASFVIEGLKEADKDEFCRCELKLQKWYGDLRGKPFAIEAENSILDISGFSKQYNCAFIWQKDGVKKLNLYLIINYFKGGKLRFKKIKPEAFEANRFYTVINKKSGEIVPMEVNFNFDDPNLIILPLAFGKRQGREFIWNDLLSLETGSLKLANGRVIEKTLYNRRTRQDEPALFVALTFERREVLDSSNIKPMNLIGVDRGENIPAVIALTDPEGCPLSRFKDSLGNPTHILRIGESYKEKQRTIQAKKEVEQRRAGGYSRKYASKAKNLADDMVRNTARDLLYYAVTQDAMLIFENLSRGFGRQGKRTFMAERQYTRMEDWLTAKLAYEGLSKTYLSKTLAQYTSKTCSNCGFTITSADYDRVLEKLKKTATGWMTTINGKELKVEGQITYYNRYKRQNVVKDLSVELDRLSEESVNNDISSWTKGRSGEALSLLKKRFSHRPVQEKFVCLNCGFETHADEQAALNIARSWLFLRSQEYKKYQTNKTTGNTDKRAFVETWQSFYRKKLKEVWKPAV

SEQ ID NO: 424 - protein, 977 aa, synthetic construct
  REGION 1..977: note = CasX variant
QEIKRINKIRRRLVKDSNTKKAGKTGPMKTLLVRVMTPDLRERLENLRKKPENIPQPISNTSRANLNKLLTDYTEMKKAILHVYWEEFQKDPVGLMSRVAQPASKKIDQNKLKPEMDEKGNLTTAGFACSQCGQPLFVYKLEQVSEKGKAYTNYFGRCNVAEHEKLILLAQLKPEKDSDEAVTYSLGKFGQRALDFYSIHVTKESTHPVKPLAQIAGNRYASGPVGKALSDACMGTIASFLSKYQDIIIEHQKVVKGNQKRLESLRELAGKENLEYPSVTLPPQPHTKEGVDAYNEVIARVRMWVNLNLWQKLKLSRDDAKPLLRLKGFPSFPLVERQANEVDWWDMVCNVKKLINEKKEDGKVFWQNLAGYKRQEALRPYLSSEEDRKKGKKFARYQLGDLLLHLEKKHGEDWGKVYDEAWERIDKKVEGLSKHIKLEEERRSEDAQSKAALTDWLRAKASFVIEGLKEADKDEFCRCELKLQKWYGDLRGKPFAIEAENSILDISGFSKQYNCAFIWQKDGVKKLNLYLIINYFKGGKLRFKKIKPEAFEANRFYTVINKKSGEIVPMEVNFNFDDPNLIILPLAFGKRQGREFIWNDLLSLETGSLKLANGRVIEKTLYNRRTRQDEPALFVALTFERREVLDSSNIKPMNLIGVDRGENIPAVIALTDPEGCPLSRFKDSLGNPTHILRIGESYKEKQRTIQAKKEVEQRRAGGYSRKYASKAKNLADDMVRNTARDLLYYAVTQDAMLIFENLSRGFGRQGKRTFMAERQYTRMEDWLTAKLAYEGLSKTYLSKTLAQYTSKTCSNCGFTIHSADYDRVLEKLKKTATGWMTTINGKELKVEGQITYYNRYKRQNVVKDLSVELDRLSEESVNNDISSWTKGRSGEALSLLKKRFSHRPVQEKFVCLNCGFETHADEQAALNIARSWLFLRSQEYKKYQTNKTTGNTDKRAFVETWQSFYRKKLKEVWKPAV

SEQ ID NO: 425 - protein, 977 aa, synthetic construct
  REGION 1..977: note = CasX variant
QEIKRINKIRRRLVKDSNTKKAGKTGPMKTLLVRVMTPDLRERLENLRKKPENIPQPISNTSRANLNKLLTDYTEMKKAILHVYWEEFQKDPVGLMSRVAQPASKKIDQNKLKPEMDEKGNLTTAGFACSQCGQPLFVYKLEQVSEKGKAYTNYFGRCNVAEHEKLILLAQLKPEKDSDEAVTYSLGKFGQRALDFYSIHVTKESTHPVKPLAQIAGNRYASGPVGKALSDACMGTIASFLSKYQDIIIEHQKVVKGNQKRLESLRELAGKENLEYPSVTLPPQPHTKEGVDAYNEVIARVRMWVNLNLWQKLKLSRDDAKPLLRLKGFPSFPLVERQANEVDWWDMVCNVKKLINEKKEDGKVFWQNLAGYKRQEALRPYLSSEEDRKKGKKFARYQLGDLLLHLEKKHGEDWGKVYDEAWERIDKKVEGLSKHIKLEEERRSEDAQSKAALTDWLRAKASFVIEGLKEADKDEFCRCELKLQKWYGDLRGKPFAIEAENSILDISGFSKQYNCAFIWQKDGVKKLNLYLIINYFKGGKLRFKKIKPEAFEANRFYTVINKKSGEIVPMEVNFNFDDPNLIILPLAFGKRQGREFIWNDLLSLETGSLKLANGRVIEKTLYNRRTRQDEPALFVALTFERREVLDSSNIKPMNLIGVDRGENIPAVIALTDPEGCPLSRFKDSLGNPTHILRIGESYKEKQRTIQAKKEVEQRRAGGYSRKYASKAKNLADDMVRNTARDLLYYAATQDAMLIFENLSRGFGRQGKRTFMAERQYTRMEDWLTAKLAYEGLSKTYLSKTLAQYTSKTCSNCGFTITSADYDRVLEKLKKTATGWMTTINGKELKVEGQITYYNRYKRQNVVKDLSVELDRLSEESVNNDISSWTKGRSGEALSLLKKRFSHRPVQEKFVCLNCGFETHADEQAALNIARSWLFLRSQEYKKYQTNKTTGNTDKRAFVETWQSFYRKKLKEVWKPAV

SEQ ID NO: 426 - protein, 977 aa, synthetic construct
  REGION 1..977: note = CasX variant
QEIKRINKIRRRLVKDSNTKKAGKTGPMKTLLVRVMTPDLRERLENLRKKPENIPQPISNTSRANLNKLLTDYTEMKKAILHVYWEEFQKDPVGLMSRVAQPASKKIDQNKLKPEMDEKGNLTTAGFACSQCGQPLFVYKLEQVSEKGKAYTNYFGRCNVAEHEKLILLAQLKPEKDSDEAVTYSLGKFGQRALDFYSIHVTKESTHPVKPLAQIAGNRYASGPVGKALSDACMGTIASFLSKYQDIIIEHQKVVKGNQKRLESLRELAGKENLEYPSVTLPPQPHTKEGVDAYNEVIARVRMWVNLNLWQKLKLSRDDAKPLLRLKGFPSFPLVERQANEVDWWDMVCNVKKLINEKKEDGKVFWQNLAGYKRQEALRPYLSSEEDRKKGKKFARYQLGDLLLHLEKKHGEDWGKVYDEAWERIDKKVEGLSKHIKLEEERRSEDAQSKAALTDWLRAKASFVIEGLKEADKDEFCRCELKLQKWYGDLRGKPFAIEAENSILDISGFSKQYNCAFIWQKDGVKKLNLYLIINYFKGGKLRFKKIKPEAFEANRFYTVINKKSGEIVPMEVNFNFDDPNLIILPLAFGKRQGREFIWNDLLSLETGSLKLANGRVIEKTLYNRRTRQDEPALFVALTFERREVLDSSNIKPMNLIGVDRGENIPAVIALTDPEGCPLSRFKDSLGNPTHILRIGESYKEKQRTIQAAKEVEQRRAGGYSRKYASKAKNLADDMVRNTARDLLYYAVTQDAMLIFENLSRGFGRQGKRTFMAERQYTRMEDWLTAKLAYEGLSKTYLSKTLAQYTSKTCSNCGFTITSADYDRVLEKLKKTATGWMTTINGKELKVEGQITYYNRYKRQNVVKDLSVELDRLSEESVNNDISSWTKGRSGEALSLLKKRFSHRPVQEKFVCLNCGFETHADEQAALNIARSWLFLRSQEYKKYQTNKTTGNTDKRAFVETWQSFYRKKLKEVWKPAV

SEQ ID NO: 427 - protein, 978 aa, synthetic construct; identical to SEQ ID NO: 92
  REGION 1..978: note = CasX variant

SEQ ID NO: 428 - protein, 978 aa, synthetic construct
  REGION 1..978: note = CasX variant
QEIKRINKIRRRLVKDSNTKKAGKTGPMKTLLVRVMTPDLRERLENLRKKPENIPQPISNTSRANLNKLLTDYTEMKKAILHVYWEEFQKDPVGLMSRVAQPASKKIDQNKLKPEMDEKGNLTTAGFACSQCGQPLFVYKLEQVSEKGKAYTNYFGRCNVAEHEKLILLAQLKPEKDSDEAVTYSLGKFGQRALDFYSIHVTKESTHPVKPLAQIAGNRYASYPVGKALSDACMGTIASFLSKYQDIIIEHQKVVKGNQKRLESLRELAGKENLEYPSVTLPPQPHTKEGVDAYNEVIARVRMWVNLNLWQKLKLSRDDAKPLLRLKGFPSFPLVERQANEVDWWDMVCNVKKLINEKKEDGKVFWQNLAGYKRQEALRPYLSSEEDRKKGKKFARYQLGDLLLHLEKKHGEDWGKVYDEAWERIDKKVEGLSKHIKLEEERRSEDAQSKAALTDWLRAKASFVIEGLKEADKDEFCRCELKLQKWYGDLRGKPFAIEAENSILDISGFSKQYNCAFIWQKDGVKKLNLYLIINYFKGGKLRFKKIKPEAFEANRFYTVINKKSGEIVPMEVNFNFDDPNLIILPLAFGKRQGREFIWNDLLSLETGSLKLANGRVIEKTLYNRRTRQDEPALFVALTFERREVLDSSNIKPMNLIGVDRGENIPAVIALTDPEGCPLSRFKDSLGNPTHILRIGESYKEKQRTIQAKKEVEQRRAGGYSRKYASKAKNLADDMVRNTARDLLYYAVTQDAMLIFENLSRGFGRQGKRTFMAERQYTRMEDWLTAKLAYEGLPSKTYLSKTLAQYTSKTCSNCGFTITSADYDRVLEKLKKTATGWMTTINGKELKVEGQITYYNRYKRQNVVKDLSVELDRLSEESVNNDISSWTKGRSGEALSLLKKRFSHRPVQEKFVCLNCGFETHADEQAALNIARSWLFLRSQEYKKYQTNKTTGNTDKRAFVETWQSFYRKKLKEVWKPAV

SEQ ID NO: 429 - protein, 978 aa, synthetic construct
  REGION 1..978: note = CasX variant
QEIKRINKIRRRLVKDSNTKKAGKTGPMKTLLVRVMTPDLRERLENLRKKPENIPQPISNTSRANLNKLLTDYTEMKKAILHVYWEEFQKDPVGLMSRVAQPASKKIDQNKLKPEMDEKGNLTTAGFACSQCGQPLFVYKLEQVSEKGKAYTNYFGRCNVAEHEKLILLAQLKPEKDSDEAVTYSLGKFGQRALDFYSIHVTKESTHPVKPLAQIAGNRYASNPVGKALSDACMGTIASFLSKYQDIIIEHQKVVKGNQKRLESLRELAGKENLEYPSVTLPPQPHTKEGVDAYNEVIARVRMWVNLNLWQKLKLSRDDAKPLLRLKGFPSFPLVERQANEVDWWDMVCNVKKLINEKKEDGKVFWQNLAGYKRQEALRPYLSSEEDRKKGKKFARYQLGDLLLHLEKKHGEDWGKVYDEAWERIDKKVEGLSKHIKLEEERRSEDAQSKAALTDWLRAKASFVIEGLKEADKDEFCRCELKLQKWYGDLRGKPFAIEAENSILDISGFSKQYNCAFIWQKDGVKKLNLYLIINYFKGGKLRFKKIKPEAFEANRFYTVINKKSGEIVPMEVNFNFDDPNLIILPLAFGKRQGREFIWNDLLSLETGSLKLANGRVIEKTLYNRRTRQDEPALFVALTFERREVLDSSNIKPMNLIGVDRGENIPAVIALTDPEGCPLSRFKDSLGNPTHILRIGESYKEKQRTIQAKKEVEQRRAGGYSRKYASKAKNLADDMVRNTARDLLYYAVTQDAMLIFENLSRGFGRQGKRTFMAERQYTRMEDWLTAKLAYEGLPSKTYLSKTLAQYTSKTCSNCGFTITSADYDRVLEKLKKTATGWMTTINGKELKVEGQITYYNRYKRQNVVKDLSVELDRLSEESVNNDISSWTKGRSGEALSLLKKRFSHRPVQEKFVCLNCGFETHADEQAALNIARSWLFLRSQEYKKYQTNKTTGNTDKRAFVETWQSFYRKKLKEVWKPAV

SEQ ID NO: 430 - protein, 979 aa, synthetic construct
  REGION 1..979: note = CasX variant
QEIKRINKIRRRLVKDSNTKKAGKTGPMKTLLVRVMTPDLRERLENLRKKPENIPQPISNTSRANLNKLLTDYTEMKKAILHVYWEEFQKDPVGLMSRVAQPASKKIDQNKLKPEMDEKGNLTTAGFACSQCGQPLFVYKLEQVSEKGKAYTNYFGRCNVAEHEKLILLAQLKPEKDSDEAVTYSLGKFGQRALDFYSIHVTKESTHPVKPLAQIAGNRYASGPVGKALSDACMGTIASFLSKYQDIIIEHQKVVKGNQKRLESLRELAGKENLEYPSVTLPPQPHTKEGVDAYNEVIARVRMWVNLNLWQKLKLSRDDAKPLLRLKGFPSFPLVERQANEVDWWDMVCNVKKLINEKKEDGKVFWQNLAGYKRQEALRPYLSSEEDRKKGKKFARYQLGDLLLHLEKKHGEDWGKVYDEAWERIDKKVEGLSKHIKLEEERRSEDAQSKAALTDWLRAKASFVIEGLKEADKDEFCRCELKLQKWYGDLRGKPFAIEAENSILDISGFSKQYNCAFIWQKDGVKKLNLYLIINYFKGWGKLRFKKIKPEAFEANRFYTVINKKSGEIVPMEVNFNFDDPNLIILPLAFGKRQGREFIWNDLLSLETGSLKLANGRVIEKTLYNRRTRQDEPALFVALTFERREVLDSSNIKPMNLIGVDRGENIPAVIALTDPEGCPLSRFKDSLGNPTHILRIGESYKEKQRTIQAKKEVEQRRAGGYSRKYASKAKNLADDMVRNTARDLLYYAVTQDAMLIFENLSRGFGRQGKRTFMAERQYTRMEDWLTAKLAYEGLPSKTYLSKTLAQYTSKTCSNCGFTITSADYDRVLEKLKKTATGWMTTINGKELKVEGQITYYNRYKRQNVVKDLSVELDRLSEESVNNDISSWTKGRSGEALSLLKKRFSHRPVQEKFVCLNCGFETHADEQAALNIARSWLFLRSQEYKKYQTNKTTGNTDKRAFVETWQSFYRKKLKEVWKPAV

SEQ ID NO: 431 - protein, 979 aa, synthetic construct
  REGION 1..979: note = CasX variant
QEIKRINKIRRRLVKDSNTKKAGKTGPMKTLLVRVMTPDLRERLENLRKKPENIPQPISNTSRANLNKLLTDYTEMKKAILHVYWEEFQKDPVGLMSRVAQPASKKIDQNKLKPEMDEKGNLTTAGFACSQCGQPLFVYKLEQVSEKGKAYTNYFGRCNVAEHEKLILLAQLKPEKDSDEAVTYSLGKFGQRALDFYSIHVTKESTHPVKPLAQIAGNRYASGPVGKALSDACMGTIASFLSKYQDIIIEHQKVVKGNQKRLESLRELAGKENLEYPSVTLPPQPHTKEGVDAYNEVIARVRMWVNLNLWQKLKLSRDDAKPLLRLKGFPSFPLVERQANEVDWWDMVCNVKKLINEKKEDGKVFWQNLAGYKRQEALRPYLSSEEDRKKGKKFARYQLGDLLLHLEKKHGEDWGKVYDEAWERIDKKVEGLSKHIKLEEERRSEDAQSKAALTDWLRAKASFVIEGLKEADKDEFCRCELKLQKWYGDLRGKPFAIEAENSILDISGFSKQYNCAFIWQKDGVKKLNLYLIINYFKGYGKLRFKKIKPEAFEANRFYTVINKKSGEIVPMEVNFNFDDPNLIILPLAFGKRQGREFIWNDLLSLETGSLKLANGRVIEKTLYNRRTRQDEPALFVALTFERREVLDSSNIKPMNLIGVDRGENIPAVIALTDPEGCPLSRFKDSLGNPTHILRIGESYKEKQRTIQAKKEVEQRRAGGYSRKYASKAKNLADDMVRNTARDLLYYAVTQDAMLIFENLSRGFGRQGKRTFMAERQYTRMEDWLTAKLAYEGLPSKTYLSKTLAQYTSKTCSNCGFTITSADYDRVLEKLKKTATGWMTTINGKELKVEGQITYYNRYKRQNVVKDLSVELDRLSEESVNNDISSWTKGRSGEALSLLKKRFSHRPVQEKFVCLNCGFETHADEQAALNIARSWLFLRSQEYKKYQTNKTTGNTDKRAFVETWQSFYRKKLKEVWKPAV

SEQ ID NO: 432 - protein, 979 aa, synthetic construct
  REGION 1..979: note = CasX variant
QEIKRINKIRRRLVKDSNTKKAGKTRGPMKTLLVRVMTPDLRERLENLRKKPENIPQPISNTSRANLNKLLTDYTEMKKAILHVYWEEFQKDPVGLMSRVAQPASKKIDQNKLKPEMDEKGNLTTAGFACSQCGQPLFVYKLEQVSEKGKAYTNYFGRCNVAEHEKLILLAQLKPEKDSDEAVTYSLGKFGQRALDFYSIHVTKESTHPVKPLAQIAGNRYASGPVGKALSDACMGTIASFLSKYQDIIIEHQKVVKGNQKRLESLRELAGKENLEYPSVTLPPQPHTKEGVDAYNEVIARVRMWVNLNLWQKLKLSRDDAKPLLRLKGFPSFPLVERQANEVDWWDMVCNVKKLINEKKEDGKVFWQNLAGYKRQEALRPYLSSEEDRKKGKKFARYQLGDLLLHLEKKHGEDWGKVYDEAWERIDKKVEGLSKHIKLEEERRSEDAQSKAALTDWLRAKASFVIEGLKEADKDEFCRCELKLQKWYGDLRGKPFAIEAENSILDISGFSKQYNCAFIWQKDGVKKLNLYLIINYFKGGKLRFKKIKPEAFEANRFYTVINKKSGEIVPMEVNFNFDDPNLIILPLAFGKRQGREFIWNDLLSLETGSLKLANGRVIEKTLYNRRTRQDEPALFVALTFERREVLDSSNIKPMNLIGVDRGENIPAVIALTDPEGCPLSRFKDSLGNPTHILRIGESYKEKQRTIQAKKEVEQRRAGGYSRKYASKAKNLADDMVRNTARDLLYYAVTQDAMLIFENLSRGFGRQGKRTFMAERQYTRMEDWLTAKLAYEGLPSKTYLSKTLAQYTSKTCSNCGFTITSADYDRVLEKLKKTATGWMTTINGKELKVEGQITYYNRYKRQNVVKDLSVELDRLSEESVNNDISSWTKGRSGEALSLLKKRFSHRPVQEKFVCLNCGFETHADEQAALNIARSWLFLRSQEYKKYQTNKTTGNTDKRAFVETWQSFYRKKLKEVWKPAV

SEQ ID NO: 433 - protein, 979 aa, synthetic construct
  REGION 1..979: note = CasX variant
QEIKRINKIRRRLVKDSNTKKAGKTRGPMKTLLVRVMTPDLRERLENLRKKPENIPQPISNTSRANLNKLLTDYTEMKKAILHVYWEEFQKDPVGLMSRVAQPASKKIDQNKLKPEMDEKGNLTTAGFACSQCGQPLFVYKLEQVSEKGKAYTNYFGRCNVAEHEKLILLAQLKPEKDSDEAVTYSLGKFGQRALDFYSIHVTKESTHPVKPLAQIAGNRYASYPVGKALSDACMGTIASFLSKYQDIIIEHQKVVKGNQKRLESLRELAGKENLEYPSVTLPPQPHTKEGVDAYNEVIARVRMWVNLNLWQKLKLSRDDAKPLLRLKGFPSFPLVERQANEVDWWDMVCNVKKLINEKKEDGKVFWQNLAGYKRQEALRPYLSSEEDRKKGKKFARYQLGDLLLHLEKKHGEDWGKVYDEAWERIDKKVEGLSKHIKLEEERRSEDAQSKAALTDWLRAKASFVIEGLKEADKDEFCRCELKLQKWYGDLRGKPFAIEAENSILDISGFSKQYNCAFIWQKDGVKKLNLYLIINYFKGGKLRFKKIKPEAFEANRFYTVINKKSGEIVPMEVNFNFDDPNLIILPLAFGKRQGREFIWNDLLSLETGSLKLANGRVIEKTLYNRRTRQDEPALFVALTFERREVLDSSNIKPMNLIGVDRGENIPAVIALTDPEGCPLSRFKDSLGNPTHILRIGESYKEKQRTIQAKKEVEQRRAGGYSRKYASKAKNLADDMVRNTARDLLYYAVTQDAMLIFENLSRGFGRQGKRTFMAERQYTRMEDWLTAKLAYEGLPSKTYLSKTLAQYTSKTCSNCGFTITSADYDRVLEKLKKTATGWMTTINGKELKVEGQITYYNRYKRQNVVKDLSVELDRLSEESVNNDISSWTKGRSGEALSLLKKRFSHRPVQEKFVCLNCGFETHADEQAALNIARSWLFLRSQEYKKYQTNKTTGNTDKRAFVETWQSFYRKKLKEVWKPAV

SEQ ID NO: 434 - protein, 978 aa, synthetic construct
  REGION 1..978: note = CasX variant
QEIKRINKIRRRLVKDSNTKKAGKTGPMKTLLVRVMTPDLRERLENLRKKPENIPQPISNTSRANLNKLLTDYTEMKKAILHVYWEEFQKDPVGLMSRVAQPASKKIDQNKLKPEMDEKGNLTTAGFACSQCGQPLFVYKLEQVSEKGKAYTNYFGRCNVAEHEKLILLAQLKPEKDSDEAVTYSLGKFGQRALDFYSIHVTKESTHPVKPLAQIAGNRYASHPVGKALSDACMGTIASFLSKYQDIIIEHQKVVKGNQKRLESLRELAGKENLEYPSVTLPPQPHTKEGVDAYNEVIARVRMWVNLNLWQKLKLSRDDAKPLLRLKGFPSFPLVERQANEVDWWDMVCNVKKLINEKKEDGKVFWQNLAGYKRQEALRPYLSSEEDRKKGKKFARYQLGDLLLHLEKKHGEDWGKVYDEAWERIDKKVEGLSKHIKLEEERRSEDAQSKAALTDWLRAKASFVIEGLKEADKDEFCRCELKLQKWYGDLRGKPFAIEAENSILDISGFSKQYNCAFIWQKDGVKKLNLYLIINYFKGGKLRFKKIKPEAFEANRFYTVINKKSGEIVPMEVNFNFDDPNLIILPLAFGKRQGREFIWNDLLSLETGSLKLANGRVIEKTLYNRRTRQDEPALFVALTFERREVLDSSNIKPMNLIGVDRGENIPAVIALTDPEGCPLSRFKDSLGNPTHILRIGESYKEKQRTIQAKKEVEQRRAGGYSRKYASKAKNLADDMVRNTARDLLYYAVTQDAMLIFENLSRGFGRQGKRTFMAERQYTRMEDWLTAKLAYEGLPSKTYLSKTLAQYTSKTCSNCGFTITSADYDRVLEKLKKTATGWMTTINGKELKVEGQITYYNRYKRQNVVKDLSVELDRLSEESVNNDISSWTKGRSGEALSLLKKRFSHRPVQEKFVCLNCGFETHADEQAALNIARSWLFLRSQEYKKYQTNKTTGNTDKRAFVETWQSFYRKKLKEVWKPAV

SEQ ID NO: 435 - protein, 978 aa, synthetic construct; identical to SEQ ID NO: 93
  REGION 1..978: note = CasX variant

SEQ ID NO: 436 - protein, 978 aa, synthetic construct; identical to SEQ ID NO: 94
  REGION 1..978: note = CasX variant

SEQ ID NO: 437 - protein, 978 aa, synthetic construct; identical to SEQ ID NO: 95
  REGION 1..978: note = CasX variant

SEQ ID NO: 438 - protein, 978 aa, synthetic construct
  REGION 1..978: note = CasX variant
QEIKRINKIRRRLVKDSNTKKAGKTGPMKTLLVRVMTPDLRERLENLRKKPENIPQPISNTSRANLNKLLTDYTEMKKAILHVYWEEFQKDPVGLMSRVAQPASKKIDQNKLKPEMDEKGNLTTAGFACSQCGQPLFVYKLEQVSEKGKAYTNYFGRCNVAEHEKLILLAQLKPEKDSDEAVTYSLGKFGQRALDFYSIHVTKESTHPVKPLAQIAGNRYASVPVGKALSDACMGTIASFLSKYQDIIIEHQKVVKGNQKRLESLRELAGKENLEYPSVTLPPQPHTKEGVDAYNEVIARVRMWVNLNLWQKLKLSRDDAKPLLRLKGFPSFPLVERQANEVDWWDMVCNVKKLINEKKEDGKVFWQNLAGYKRQEALRPYLSSEEDRKKGKKFARYQLGDLLLHLEKKHGEDWGKVYDEAWERIDKKVEGLSKHIKLEEERRSEDAQSKAALTDWLRAKASFVIEGLKEADKDEFCRCELKLQKWYGDLRGKPFAIEAENSILDISGFSKQYNCAFIWQKDGVKKLNLYLIINYFKGGKLRFKKIKPEAFEANRFYTVINKKSGEIVPMEVNFNFDDPNLIILPLAFGKRQGREFIWNDLLSLETGSLKLANGRVIEKTLYNRRTRQDEPALFVALTFERREVLDSSNIKPMNLIGVDRGENIPAVIALTDPEGCPLSRFKDSLGNPTHILRIGESYKEKQRTIQAKKEVEQRRAGGYSRKYASKAKNLADDMVRNTARDLLYYAVTQDAMLIFENLSRGFGRQGKRTFMAERQYTRMEDWLTAKLAYEGLPSKTYLSKTLAQYTSKTCSNCGFTITSADYDRVLEKLKKTATGWMTTINGKELKVEGQITYYNRYKRQNVVKDLSVELDRLSEESVNNDISSWTKGRSGEALSLLKKRFSHRPVQEKFVCLNCGFETHADEQAALNIARSWLFLRSQEYKKYQTNKTTGNTDKRAFVETWQSFYRKKLKEVWKPAV

SEQ ID NO: 439 - protein, 978 aa, synthetic construct
  REGION 1..978: note = CasX variant
QEIKRINKIRRRLVKDSNTKKAGKTGPMKTLLVRVMTPDLRERLENLRKKPENIPQPISNTSRANLNKLLTDYTEMKKAILHVYWEEFQKDPVGLMSRVAQPASKKIDQNKLKPEMDEKGNLTTAGFACSQCGQPLFVYKLEQVSEKGKAYTNYFGRCNVAEHEKLILLAQLKPEKDSDEAVTYSLGKFGQRALDFYSIHVTKESTHPVKPLAQIAGNRYASGPVGKALSLACMGTIASFLSKYQDIIIEHQKVVKGNQKRLESLRELAGKENLEYPSVTLPPQPHTKEGVDAYNEVIARVRMWVNLNLWQKLKLSRDDAKPLLRLKGFPSFPLVERQANEVDWWDMVCNVKKLINEKKEDGKVFWQNLAGYKRQEALRPYLSSEEDRKKGKKFARYQLGDLLLHLEKKHGEDWGKVYDEAWERIDKKVEGLSKHIKLEEERRSEDAQSKAALTDWLRAKASFVIEGLKEADKDEFCRCELKLQKWYGDLRGKPFAIEAENSILDISGFSKQYNCAFIWQKDGVKKLNLYLIINYFKGGKLRFKKIKPEAFEANRFYTVINKKSGEIVPMEVNFNFDDPNLIILPLAFGKRQGREFIWNDLLSLETGSLKLANGRVIEKTLYNRRTRQDEPALFVALTFERREVLDSSNIKPMNLIGVDRGENIPAVIALTDPEGCPLSRFKDSLGNPTHILRIGESYKEKQRTIQAKKEVEQRRAGGYSRKYASKAKNLADDMVRNTARDLLYYAVTQDAMLIFENLSRGFGRQGKRTFMAERQYTRMEDWLTAKLAYEGLPSKTYLSKTLAQYTSKTCSNCGFTITSADYDRVLEKLKKTATGWMTTINGKELKVEGQITYYNRYKRQNVVKDLSVELDRLSEESVNNDISSWTKGRSGEALSLLKKRFSHRPVQEKFVCLNCGFETHADEQAALNIARSWLFLRSQEYKKYQTNKTTGNTDKRAFVETWQSFYRKKLKEVWKPAV

SEQ ID NO: 440 - protein, 978 aa, synthetic construct
  REGION 1..978: note = CasX variant
QEIKRINKIRRRLVKDSNTKKAGKTGPMKTLLVRVMTPDLRERLENLRKKPENIPQPISNTSRANLNKLLTDYTEMKKAILHVYWEEFQKDPVGLMSRVAQPASKKIDQNKLKPEMDEKGNLTTAGFACSQCGQPLFVYKLEQVSEKGKAYTNYFGRCNVAEHEKLILLAQLKPEKDSDEAVTYSLGKFGQRALDFYSIHVTKESTHPVKPLAQIAGNRYASGPVGKALSNACMGTIASFLSKYQDIIIEHQKVVKGNQKRLESLRELAGKENLEYPSVTLPPQPHTKEGVDAYNEVIARVRMWVNLNLWQKLKLSRDDAKPLLRLKGFPSFPLVERQANEVDWWDMVCNVKKLINEKKEDGKVFWQNLAGYKRQEALRPYLSSEEDRKKGKKFARYQLGDLLLHLEKKHGEDWGKVYDEAWERIDKKVEGLSKHIKLEEERRSEDAQSKAALTDWLRAKASFVIEGLKEADKDEFCRCELKLQKWYGDLRGKPFAIEAENSILDISGFSKQYNCAFIWQKDGVKKLNLYLIINYFKGGKLRFKKIKPEAFEANRFYTVINKKSGEIVPMEVNFNFDDPNLIILPLAFGKRQGREFIWNDLLSLETGSLKLANGRVIEKTLYNRRTRQDEPALFVALTFERREVLDSSNIKPMNLIGVDRGENIPAVIALTDPEGCPLSRFKDSLGNPTHILRIGESYKEKQRTIQAKKEVEQRRAGGYSRKYASKAKNLADDMVRNTARDLLYYAVTQDAMLIFENLSRGFGRQGKRTFMAERQYTRMEDWLTAKLAYEGLPSKTYLSKTLAQYTSKTCSNCGFTITSADYDRVLEKLKKTATGWMTTINGKELKVEGQITYYNRYKRQNVVKDLSVELDRLSEESVNNDISSWTKGRSGEALSLLKKRFSHRPVQEKFVCLNCGFETHADEQAALNIARSWLFLRSQEYKKYQTNKTTGNTDKRAFVETWQSFYRKKLKEVWKPAV

SEQ ID NO: 441 - protein, 978 aa, synthetic construct
  REGION 1..978: note = CasX variant
QEIKRINKIRRRLVKDSNTKKAGKTGPMKTLLVRVMTPDLRERLENLRKKPENIPQPISNTSRANLNKLLTDYTEMKKAILHVYWEEFQKDPVGLMSRVAQPASKKIDQNKLKPEMDEKGNLTTAGFACSQCGQPLFVYKLEQVSEKGKAYTNYFGRCNVAEHEKLILLAQLKPEKDSDEAVTYSLGKFGQRALDFYSIHVTKESTHPVKPLAQIAGNRYASGPVGKALSQACMGTIASFLSKYQDIIIEHQKVVKGNQKRLESLRELAGKENLEYPSVTLPPQPHTKEGVDAYNEVIARVRMWVNLNLWQKLKLSRDDAKPLLRLKGFPSFPLVERQANEVDWWDMVCNVKKLINEKKEDGKVFWQNLAGYKRQEALRPYLSSEEDRKKGKKFARYQLGDLLLHLEKKHGEDWGKVYDEAWERIDKKVEGLSKHIKLEEERRSEDAQSKAALTDWLRAKASFVIEGLKEADKDEFCRCELKLQKWYGDLRGKPFAIEAENSILDISGFSKQYNCAFIWQKDGVKKLNLYLIINYFKGGKLRFKKIKPEAFEANRFYTVINKKSGEIVPMEVNFNFDDPNLIILPLAFGKRQGREFIWNDLLSLETGSLKLANGRVIEKTLYNRRTRQDEPALFVALTFERREVLDSSNIKPMNLIGVDRGENIPAVIALTDPEGCPLSRFKDSLGNPTHILRIGESYKEKQRTIQAKKEVEQRRAGGYSRKYASKAKNLADDMVRNTARDLLYYAVTQDAMLIFENLSRGFGRQGKRTFMAERQYTRMEDWLTAKLAYEGLPSKTYLSKTLAQYTSKTCSNCGFTITSADYDRVLEKLKKTATGWMTTINGKELKVEGQITYYNRYKRQNVVKDLSVELDRLSEESVNNDISSWTKGRSGEALSLLKKRFSHRPVQEKFVCLNCGFETHADEQAALNIARSWLFLRSQEYKKYQTNKTTGNTDKRAFVETWQSFYRKKLKEVWKPAV

SEQ ID NO: 442 - protein, 978 aa, synthetic construct
  REGION 1..978: note = CasX variant
QEIKRINKIRRRLVKDSNTKKAGKTGPMKTLLVRVMTPDLRERLENLRKKPENIPQPISNTSRANLNKLLTDYTEMKKAILHVYWEEFQKDPVGLMSRVAQPASKKIDQNKLKPEMDEKGNLTTAGFACSQCGQPLFVYKLEQVSEKGKAYTNYFGRCNVAEHEKLILLAQLKPEKDSDEAVTYSLGKFGQRALDFYSIHVTKESTHPVKPLAQIAGNRYASGPVGKALSSACMGTIASFLSKYQDIIIEHQKVVKGNQKRLESLRELAGKENLEYPSVTLPPQPHTKEGVDAYNEVIARVRMWVNLNLWQKLKLSRDDAKPLLRLKGFPSFPLVERQANEVDWWDMVCNVKKLINEKKEDGKVFWQNLAGYKRQEALRPYLSSEEDRKKGKKFARYQLGDLLLHLEKKHGEDWGKVYDEAWERIDKKVEGLSKHIKLEEERRSEDAQSKAALTDWLRAKASFVIEGLKEADKDEFCRCELKLQKWYGDLRGKPFAIEAENSILDISGFSKQYNCAFIWQKDGVKKLNLYLIINYFKGGKLRFKKIKPEAFEANRFYTVINKKSGEIVPMEVNFNFDDPNLIILPLAFGKRQGREFIWNDLLSLETGSLKLANGRVIEKTLYNRRTRQDEPALFVALTFERREVLDSSNIKPMNLIGVDRGENIPAVIALTDPEGCPLSRFKDSLGNPTHILRIGESYKEKQRTIQAKKEVEQRRAGGYSRKYASKAKNLADDMVRNTARDLLYYAVTQDAMLIFENLSRGFGRQGKRTFMAERQYTRMEDWLTAKLAYEGLPSKTYLSKTLAQYTSKTCSNCGFTITSADYDRVLEKLKKTATGWMTTINGKELKVEGQITYYNRYKRQNVVKDLSVELDRLSEESVNNDISSWTKGRSGEALSLLKKRFSHRPVQEKFVCLNCGFETHADEQAALNIARSWLFLRSQEYKKYQTNKTTGNTDKRAFVETWQSFYRKKLKEVWKPAV

SEQ ID NO: 443 - protein, 978 aa, synthetic construct
  REGION 1..978: note = CasX variant
QEIKRINKIRRRLVKDSNTKKAGKTGPMKTLLVRVMTPDLRERLENLRKKPENIPQPISNTSRANLNKLLTDYTEMKKAILHVYWEEFQKDPVGLMSRVAQPASKKIDQNKLKPEMDEKGNLTTAGFACSQCGQPLFVYKLEQVSEKGKAYTNYFGRCNVAEHEKLILLAQLKPEKDSDEAVTYSLGKFGQRALDFYSIHVTKESTHPVKPLAQIAGNRYASGPVGKALSAACMGTIASFLSKYQDIIIEHQKVVKGNQKRLESLRELAGKENLEYPSVTLPPQPHTKEGVDAYNEVIARVRMWVNLNLWQKLKLSRDDAKPLLRLKGFPSFPLVERQANEVDWWDMVCNVKKLINEKKEDGKVFWQNLAGYKRQEALRPYLSSEEDRKKGKKFARYQLGDLLLHLEKKHGEDWGKVYDEAWERIDKKVEGLSKHIKLEEERRSEDAQSKAALTDWLRAKASFVIEGLKEADKDEFCRCELKLQKWYGDLRGKPFAIEAENSILDISGFSKQYNCAFIWQKDGVKKLNLYLIINYFKGGKLRFKKIKPEAFEANRFYTVINKKSGEIVPMEVNFNFDDPNLIILPLAFGKRQGREFIWNDLLSLETGSLKLANGRVIEKTLYNRRTRQDEPALFVALTFERREVLDSSNIKPMNLIGVDRGENIPAVIALTDPEGCPLSRFKDSLGNPTHILRIGESYKEKQRTIQAKKEVEQRRAGGYSRKYASKAKNLADDMVRNTARDLLYYAVTQDAMLIFENLSRGFGRQGKRTFMAERQYTRMEDWLTAKLAYEGLPSKTYLSKTLAQYTSKTCSNCGFTITSADYDRVLEKLKKTATGWMTTINGKELKVEGQITYYNRYKRQNVVKDLSVELDRLSEESVNNDISSWTKGRSGEALSLLKKRFSHRPVQEKFVCLNCGFETHADEQAALNIARSWLFLRSQEYKKYQTNKTTGNTDKRAFVETWQSFYRKKLKEVWKPAV

SEQ ID NO: 444 - protein, 978 aa, synthetic construct
  REGION 1..978: note = CasX variant
QEIKRINKIRRRLVKDSNTKKAGKTGPMKTLLVRVMTPDLRERLENLRKKPENIPQPISNTSRANLNKLLTDYTEMKKAILHVYWEEFQKDPVGLMSRVAQPASKKIDQNKLKPEMDEKGNLTTAGFACSQCGQPLFVYKLEQVSEKGKAYTNYFGRCNVAEHEKLILLAQLKPEKDSDEAVTYSLGKFGQRALDFYSIHVTKESTHPVKPLAQIAGNRYASGPVGKALSGACMGTIASFLSKYQDIIIEHQKVVKGNQKRLESLRELAGKENLEYPSVTLPPQPHTKEGVDAYNEVIARVRMWVNLNLWQKLKLSRDDAKPLLRLKGFPSFPLVERQANEVDWWDMVCNVKKLINEKKEDGKVFWQNLAGYKRQEALRPYLSSEEDRKKGKKFARYQLGDLLLHLEKKHGEDWGKVYDEAWERIDKKVEGLSKHIKLEEERRSEDAQSKAALTDWLRAKASFVIEGLKEADKDEFCRCELKLQKWYGDLRGKPFAIEAENSILDISGFSKQYNCAFIWQKDGVKKLNLYLIINYFKGGKLRFKKIKPEAFEANRFYTVINKKSGEIVPMEVNFNFDDPNLIILPLAFGKRQGREFIWNDLLSLETGSLKLANGRVIEKTLYNRRTRQDEPALFVALTFERREVLDSSNIKPMNLIGVDRGENIPAVIALTDPEGCPLSRFKDSLGNPTHILRIGESYKEKQRTIQAKKEVEQRRAGGYSRKYASKAKNLADDMVRNTARDLLYYAVTQDAMLIFENLSRGFGRQGKRTFMAERQYTRMEDWLTAKLAYEGLPSKTYLSKTLAQYTSKTCSNCGFTITSADYDRVLEKLKKTATGWMTTINGKELKVEGQITYYNRYKRQNVVKDLSVELDRLSEESVNNDISSWTKGRSGEALSLLKKRFSHRPVQEKFVCLNCGFETHADEQAALNIARSWLFLRSQEYKKYQTNKTTGNTDKRAFVETWQSFYRKKLKEVWKPAV

SEQ ID NO: 445 - protein, 978 aa, synthetic construct
  REGION 1..978: note = CasX variant
QEIKRINKIRRRLVKDSNTKKAGKTGPMKTLLVRVMTPDLRERLENLRKKPENIPQPISNTSRANLNKLLTDYTEMKKAILHVYWEEFQKDPVGLMSRVAQPASKKIDQNKLKPEMDEKGNLTTAGFACSQCGQPLFVYKLEQVSEKGKAYTNYFGRCNVAEHEKLILLAQLKPEKDSDEAVTYSLGKFGQRALDFYSIHVTKESTHPVKPLAQIAGNRYASGPVGKALSTACMGTIASFLSKYQDIIIEHQKVVKGNQKRLESLRELAGKENLEYPSVTLPPQPHTKEGVDAYNEVIARVRMWVNLNLWQKLKLSRDDAKPLLRLKGFPSFPLVERQANEVDWWDMVCNVKKLINEKKEDGKVFWQNLAGYKRQEALRPYLSSEEDRKKGKKFARYQLGDLLLHLEKKHGEDWGKVYDEAWERIDKKVEGLSKHIKLEEERRSEDAQSKAALTDWLRAKASFVIEGLKEADKDEFCRCELKLQKWYGDLRGKPFAIEAENSILDISGFSKQYNCAFIWQKDGVKKLNLYLIINYFKGGKLRFKKIKPEAFEANRFYTVINKKSGEIVPMEVNFNFDDPNLIILPLAFGKRQGREFIWNDLLSLETGSLKLANGRVIEKTLYNRRTRQDEPALFVALTFERREVLDSSNIKPMNLIGVDRGENIPAVIALTDPEGCPLSRFKDSLGNPTHILRIGESYKEKQRTIQAKKEVEQRRAGGYSRKYASKAKNLADDMVRNTARDLLYYAVTQDAMLIFENLSRGFGRQGKRTFMAERQYTRMEDWLTAKLAYEGLPSKTYLSKTLAQYTSKTCSNCGFTITSADYDRVLEKLKKTATGWMTTINGKELKVEGQITYYNRYKRQNVVKDLSVELDRLSEESVNNDISSWTKGRSGEALSLLKKRFSHRPVQEKFVCLNCGFETHADEQAALNIARSWLFLRSQEYKKYQTNKTTGNTDKRAFVETWQSFYRKKLKEVWKPAV

SEQ ID NO: 446 - protein, 978 aa, synthetic construct
  REGION 1..978: note = CasX variant
QEIKRINKIRRRLVKDSNTKKAGKRGPMKTLLVRVMTPDLRERLENLRKKPENIPQPISNTSRANLNKLLTDYTEMKKAILHVYWEEFQKDPVGLMSRVAQPASKKIDQNKLKPEMDEKGNLTTAGFACSQCGQPLFVYKLEQVSEKGKAYTNYFGRCNVAEHEKLILLAQLKPEKDSDEAVTYSLGKFGQRALDFYSIHVTKESTHPVKPLAQIAGNRYASGPVGKALSDACMGTIASFLSKYQDIIIEHQKVVKGNQKRLESLRELAGKENLEYPSVTLPPQPHTKEGVDAYNEVIARVRMWVNLNLWQKLKLSRDDAKPLLRLKGFPSFPLVERQANEVDWWDMVCNVKKLINEKKEDGKVFWQNLAGYKRQEALRPYLSSEEDRKKGKKFARYQLGDLLLHLEKKHGEDWGKVYDEAWERIDKKVEGLSKHIKLEEERRSEDAQSKAALTDWLRAKASFVIEGLKEADKDEFCRCELKLQKWYGDLRGKPFAIEAENSILDISGFSKQYNCAFIWQKDGVKKLNLYLIINYFKGGKLRFKKIKPEAFEANRFYTVINKKSGEIVPMEVNFNFDDPNLIILPLAFGKRQGREFIWNDLLSLETGSLKLANGRVIEKTLYNRRTRQDEPALFVALTFERREVLDSSNIKPMNLIGVDRGENIPAVIALTDPEGCPLSRFKDSLGNPTHILRIGESYKEKQRTIQAKKEVEQRRAGGYSRKYASKAKNLADDMVRNTARDLLYYAVTQDAMLIFENLSRGFGRQGKRTFMAERQYTRMEDWLTAKLAYEGLPSKTYLSKTLAQYTSKTCSNCGFTITSADYDRVLEKLKKTATGWMTTINGKELKVEGQITYYNRYKRQNVVKDLSVELDRLSEESVNNDISSWTKGRSGEALSLLKKRFSHRPVQEKFVCLNCGFETHADEQAALNIARSWLFLRSQEYKKYQTNKTTGNTDKRAFVETWQSFYRKKLKEVWKPAV

SEQ ID NO: 447 - protein, 978 aa, synthetic construct
  REGION 1..978: note = CasX variant
QEIKRINKIRRRLVKDSNTKKAGKTGPMKTLLVRVMTPDLRERLENLRKKPENIPQPISNTSRANLNKLLTDYTEMKKAILHVYWEEFQKDPVGLMSRVAQPASKKIDQNKLKPEMDEKGNLTTAGFACSQCGQPLFVYKLEQVSEKGKAYTNYFGRCNVAEHEKLILLAQLKPEKDSDEAVTYSLGKFGQRALDFYSIHVTKESTHPVKPLAQIAGNRYASGPVGKALSDACMGTIASFLSKYQDIIIEHQKVVKGNQKRLESLRELAGKENLEYPSVTLPPQPHTKEGVDAYNEVIARVRMWVNLNLWQKLKLSRDDAKPLLRLKGFPSFPLVERQANEVDWWDMVCNVKKLINEKKEDGKVFWQNLAGYKRQEALRPYLSSEEDRKKGKKFARYQLHDLLLHLEKKHGEDWGKVYDEAWERIDKKVEGLSKHIKLEEERRSEDAQSKAALTDWLRAKASFVIEGLKEADKDEFCRCELKLQKWYGDLRGKPFAIEAENSILDISGFSKQYNCAFIWQKDGVKKLNLYLIINYFKGGKLRFKKIKPEAFEANRFYTVINKKSGEIVPMEVNFNFDDPNLIILPLAFGKRQGREFIWNDLLSLETGSLKLANGRVIEKTLYNRRTRQDEPALFVALTFERREVLDSSNIKPMNLIGVDRGENIPAVIALTDPEGCPLSRFKDSLGNPTHILRIGESYKEKQRTIQAKKEVEQRRAGGYSRKYASKAKNLADDMVRNTARDLLYYAVTQDAMLIFENLSRGFGRQGKRTFMAERQYTRMEDWLTAKLAYEGLPSKTYLSKTLAQYTSKTCSNCGFTITSADYDRVLEKLKKTATGWMTTINGKELKVEGQITYYNRYKRQNVVKDLSVELDRLSEESVNNDISSWTKGRSGEALSLLKKRFSHRPVQEKFVCLNCGFETHADEQAALNIARSWLFLRSQEYKKYQTNKTTGNTDKRAFVETWQSFYRKKLKEVWKPAV

SEQ ID NO: 448 - protein, 979 aa, synthetic construct
  REGION 1..979: note = CasX variant
QEIKRINKIRRRLVKDSNTKKAGKTGPMKTLLVRVMTPDLRERLENLRKKPENIPQPISNTSRANLNKLLTDYTEMKKAILHVYWEEFQKDPVGLMSRVAQPASKKIDQNKLKPEMDEKEGNLTTAGFACSQCGQPLFVYKLEQVSEKGKAYTNYFGRCNVAEHEKLILLAQLKPEKDSDEAVTYSLGKFGQRALDFYSIHVTKESTHPVKPLAQIAGNRYASGPVGKALSDACMGTIASFLSKYQDIIIEHQKVVKGNQKRLESLRELAGKENLEYPSVTLPPQPHTKEGVDAYNEVIARVRMWVNLNLWQKLKLSRDDAKPLLRLKGFPSFPLVERQANEVDWWDMVCNVKKLINEKKEDGKVFWQNLAGYKRQEALRPYLSSEEDRKKGKKFARYQLGDLLLHLEKKHGEDWGKVYDEAWERIDKKVEGLSKHIKLEEERRSEDAQSKAALTDWLRAKASFVIEGLKEADKDEFCRCELKLQKWYGDLRGKPFAIEAENSILDISGFSKQYNCAFIWQKDGVKKLNLYLIINYFKGGKLRFKKIKPEAFEANRFYTVINKKSGEIVPMEVNFNFDDPNLIILPLAFGKRQGREFIWNDLLSLETGSLKLANGRVIEKTLYNRRTRQDEPALFVALTFERREVLDSSNIKPMNLIGVDRGENIPAVIALTDPEGCPLSRFKDSLGNPTHILRIGESYKEKQRTIQAKKEVEQRRAGGYSRKYASKAKNLADDMVRNTARDLLYYAVTQDAMLIFENLSRGFGRQGKRTFMAERQYTRMEDWLTAKLAYEGLPSKTYLSKTLAQYTSKTCSNCGFTITSADYDRVLEKLKKTATGWMTTINGKELKVEGQITYYNRYKRQNVVKDLSVELDRLSEESVNNDISSWTKGRSGEALSLLKKRFSHRPVQEKFVCLNCGFETHADEQAALNIARSWLFLRSQEYKKYQTNKTTGNTDKRAFVETWQSFYRKKLKEVWKPAV

SEQ ID NO: 449 - protein, 978 aa, synthetic construct
  REGION 1..978: note = CasX variant
QEIKRINKIRRRLVKDSNTKKAGKTGPMKTLLVRVMTPDLRERLENLRKKPENIPQPISNTSRANLNKLLTDYTEMKKAILHVYWEEFQKDPVGLMSRVAQPASKKIDQNKLKPEMDEKGNLTTAGFACSQCGQPLFVYKLEQVSEKGKAYTNYFGRCNVAEHEKLILLAQLKPEKDSDEAVTYSLGKFGQRALDFYSIHVTKESTHPVKPLAQIAGNRYASGPVGKALSDACMGTIASFLSKYQDIIIEHQKVVKGNQKRLESLRELAGKENLEYPSVTLPPQPHTKEGVDAYNEVIARVRMWVNINLWQKLKLSRDDAKPLLRLKGFPSFPLVERQANEVDWWDMVCNVKKLINEKKEDGKVFWQNLAGYKRQEALRPYLSSEEDRKKGKKFARYQLGDLLLHLEKKHGEDWGKVYDEAWERIDKKVEGLSKHIKLEEERRSEDAQSKAALTDWLRAKASFVIEGLKEADKDEFCRCELKLQKWYGDLRGKPFAIEAENSILDISGFSKQYNCAFIWQKDGVKKLNLYLIINYFKGGKLRFKKIKPEAFEANRFYTVINKKSGEIVPMEVNFNFDDPNLIILPLAFGKRQGREFIWNDLLSLETGSLKLANGRVIEKTLYNRRTRQDEPALFVALTFERREVLDSSNIKPMNLIGVDRGENIPAVIALTDPEGCPLSRFKDSLGNPTHILRIGESYKEKQRTIQAKKEVEQRRAGGYSRKYASKAKNLADDMVRNTARDLLYYAVTQDAMLIFENLSRGFGRQGKRTFMAERQYTRMEDWLTAKLAYEGLPSKTYLSKTLAQYTSKTCSNCGFTITSADYDRVLEKLKKTATGWMTTINGKELKVEGQITYYNRYKRQNVVKDLSVELDRLSEESVNNDISSWTKGRSGEALSLLKKRFSHRPVQEKFVCLNCGFETHADEQAALNIARSWLFLRSQEYKKYQTNKTTGNTDKRAFVETWQSFYRKKLKEVWKPAV

SEQ ID NO: 450 - protein, 979 aa, synthetic construct
  REGION 1..979: note = CasX variant
QEIKRINKIRRRLVKDSNTKKAGKTGPMKTLLVRVMTPDLRERLENLRKKPENIPQPISNTSRANLNKLLTDYTEMKKAILHVYWEEFQKDPVGLMSRVAQPASKKIDQNKLKPEMDEKGNLTTAGFACSQCGQPLFVYKLEQVSEKGKAYTNYFGRCNVAEHEKLILLAQLKPEKDSDEAVTYSLGKFGQRALDFYSIHVTKESTHPVKPLAQIAGNRYASGPVGKALSDACMGTIASFLSKYQDIIIEHQKVVKGNQKRLESLRELAGKENLEYPSVTLPPQPHTKEGVDAYNEVIARVRMWVNLNLWQKLKLSRDDAKPLLRLKGFPSFPLVERQANEVDWWDMVCNVKKLINEKKEDGKVFWQNLAGYKRQEALRPYLFSSEEDRKKGKKFARYQLGDLLLHLEKKHGEDWGKVYDEAWERIDKKVEGLSKHIKLEEERRSEDAQSKAALTDWLRAKASFVIEGLKEADKDEFCRCELKLQKWYGDLRGKPFAIEAENSILDISGFSKQYNCAFIWQKDGVKKLNLYLIINYFKGGKLRFKKIKPEAFEANRFYTVINKKSGEIVPMEVNFNFDDPNLIILPLAFGKRQGREFIWNDLLSLETGSLKLANGRVIEKTLYNRRTRQDEPALFVALTFERREVLDSSNIKPMNLIGVDRGENIPAVIALTDPEGCPLSRFKDSLGNPTHILRIGESYKEKQRTIQAKKEVEQRRAGGYSRKYASKAKNLADDMVRNTARDLLYYAVTQDAMLIFENLSRGFGRQGKRTFMAERQYTRMEDWLTAKLAYEGLPSKTYLSKTLAQYTSKTCSNCGFTITSADYDRVLEKLKKTATGWMTTINGKELKVEGQITYYNRYKRQNVVKDLSVELDRLSEESVNNDISSWTKGRSGEALSLLKKRFSHRPVQEKFVCLNCGFETHADEQAALNIARSWLFLRSQEYKKYQTNKTTGNTDKRAFVETWQSFYRKKLKEVWKPAV

SEQ ID NO: 451 - protein, 979 aa, synthetic construct
  REGION 1..979: note = CasX variant
QEIKRINKIRRRLVKDSNTKKAGKTGPMKTLLVRVMTPDLRERLENLRKKPENIPQPISNTSRANLNKLLTDYTEMKKAILHVYWEEFQKDPVGLMSRVAQPASKKIDQNKLKPEMDEKGNLTTAGFACSQCGQPLFVYKWLEQVSEKGKAYTNYFGRCNVAEHEKLILLAQLKPEKDSDEAVTYSLGKFGQRALDFYSIHVTKESTHPVKPLAQIAGNRYASGPVGKALSDACMGTIASFLSKYQDIIIEHQKVVKGNQKRLESLRELAGKENLEYPSVTLPPQPHTKEGVDAYNEVIARVRMWVNLNLWQKLKLSRDDAKPLLRLKGFPSFPLVERQANEVDWWDMVCNVKKLINEKKEDGKVFWQNLAGYKRQEALRPYLSSEEDRKKGKKFARYQLGDLLLHLEKKHGEDWGKVYDEAWERIDKKVEGLSKHIKLEEERRSEDAQSKAALTDWLRAKASFVIEGLKEADKDEFCRCELKLQKWYGDLRGKPFAIEAENSILDISGFSKQYNCAFIWQKDGVKKLNLYLIINYFKGGKLRFKKIKPEAFEANRFYTVINKKSGEIVPMEVNFNFDDPNLIILPLAFGKRQGREFIWNDLLSLETGSLKLANGRVIEKTLYNRRTRQDEPALFVALTFERREVLDSSNIKPMNLIGVDRGENIPAVIALTDPEGCPLSRFKDSLGNPTHILRIGESYKEKQRTIQAKKEVEQRRAGGYSRKYASKAKNLADDMVRNTARDLLYYAVTQDAMLIFENLSRGFGRQGKRTFMAERQYTRMEDWLTAKLAYEGLPSKTYLSKTLAQYTSKTCSNCGFTITSADYDRVLEKLKKTATGWMTTINGKELKVEGQITYYNRYKRQNVVKDLSVELDRLSEESVNNDISSWTKGRSGEALSLLKKRFSHRPVQEKFVCLNCGFETHADEQAALNIARSWLFLRSQEYKKYQTNKTTGNTDKRAFVETWQSFYRKKLKEVWKPAV

SEQ ID NO: 452 - protein, 978 aa, synthetic construct
  REGION 1..978: note = CasX variant
QEIKRINKIRRRLVKDSNTKKAGKTGPMKTLLVRVMTPDLRERLENLRKKPENIPQPISNTSRANLNKLLTDYTEMKKAILHVYWEEFQKDPVGLMSRVAQPASKKIDQNKLKPEMDEKGNLTTAGFACSQCGQPLFVYKLEQVSEKGKAYTNYFGRCNVAEHEKLILLAQLKPEKDSDEAVTYSLGKFGQRALDFYSIHVTKESTHPVKPLAQIAGNRYASGPVGKALSDACMGTIASFLSKYQDIIIEHQKVVKGNQKRLESLRELAGKENLEYPSVTLPPQPHTKEGVDAYNEVIARVRMWVNDNLWQKLKLSRDDAKPLLRLKGFPSFPLVERQANEVDWWDMVCNVKKLINEKKEDGKVFWQNLAGYKRQEALRPYLSSEEDRKKGKKFARYQLGDLLLHLEKKHGEDWGKVYDEAWERIDKKVEGLSKHIKLEEERRSEDAQSKAALTDWLRAKASFVIEGLKEADKDEFCRCELKLQKWYGDLRGKPFAIEAENSILDISGFSKQYNCAFIWQKDGVKKLNLYLIINYFKGGKLRFKKIKPEAFEANRFYTVINKKSGEIVPMEVNFNFDDPNLIILPLAFGKRQGREFIWNDLLSLETGSLKLANGRVIEKTLYNRRTRQDEPALFVALTFERREVLDSSNIKPMNLIGVDRGENIPAVIALTDPEGCPLSRFKDSLGNPTHILRIGESYKEKQRTIQAKKEVEQRRAGGYSRKYASKAKNLADDMVRNTARDLLYYAVTQDAMLIFENLSRGFGRQGKRTFMAERQYTRMEDWLTAKLAYEGLPSKTYLSKTLAQYTSKTCSNCGFTITSADYDRVLEKLKKTATGWMTTINGKELKVEGQITYYNRYKRQNVVKDLSVELDRLSEESVNNDISSWTKGRSGEALSLLKKRFSHRPVQEKFVCLNCGFETHADEQAALNIARSWLFLRSQEYKKYQTNKTTGNTDKRAFVETWQSFYRKKLKEVWKPAV

SEQ ID NO: 453 - protein, 978 aa, synthetic construct
  REGION 1..978: note = CasX variant
QEIKRINKIRRRLVKDSNTKKAGKTGPMKTLLVRVMTPDLRERLENLRKKPENIPQPISNTSRANLNKLLTDYTEMKKAILHVYWEEFQKDPVGLMSRVAQPASKKIDQNKLKPEMDEKGNLTTAGFACSQCGQPLFVYKLEQVSEKGKAYTNYFGRCNVAEHEKLILLAQLKPEKDSDEAVTYSLGKFGQRALDFYSIHVTKESTHPVKPLAQIAGNRYASGPVGKALSDACMGTIASFLSKYQDIIIEHQKVVKGNQKRLESLRELAGKENLEYPSVTLPPQPHTKEGVDAYNEVIARVRMWVNLNLWQKLKLSRDDAKPLLRLKGFPSFPLVERQANEVDWWDMVCNVKKLINEKKEDGKVFWQNLAGYKRQEALRPYLSSEEDRKKGKKFARYQLGDLLLHLEKKHGEDWGKVYDEAWERIDKKVEGLSKHIKLEEERRSEDAQSKAALTDWLRAKASFVIEGLKEADKDEFCRCELKLQKWYGDLRGKPFAIEAENSILDISGFSTQYNCAFIWQKDGVKKLNLYLIINYFKGGKLRFKKIKPEAFEANRFYTVINKKSGEIVPMEVNFNFDDPNLIILPLAFGKRQGREFIWNDLLSLETGSLKLANGRVIEKTLYNRRTRQDEPALFVALTFERREVLDSSNIKPMNLIGVDRGENIPAVIALTDPEGCPLSRFKDSLGNPTHILRIGESYKEKQRTIQAKKEVEQRRAGGYSRKYASKAKNLADDMVRNTARDLLYYAVTQDAMLIFENLSRGFGRQGKRTFMAERQYTRMEDWLTAKLAYEGLPSKTYLSKTLAQYTSKTCSNCGFTITSADYDRVLEKLKKTATGWMTTINGKELKVEGQITYYNRYKRQNVVKDLSVELDRLSEESVNNDISSWTKGRSGEALSLLKKRFSHRPVQEKFVCLNCGFETHADEQAALNIARSWLFLRSQEYKKYQTNKTTGNTDKRAFVETWQSFYRKKLKEVWKPAV

SEQ ID NO: 454 - protein, 978 aa, synthetic construct
  REGION 1..978: note = CasX variant
QEIKRINKIRRRLVKDSNTKKAGKTGPMKTLLVRVMTPDLRERLENLRKKPENIPQPISNTSRANLNKLLTDYTEMKKAILHVYWEEFQKDPVGLMSRVAQPASKKIDQNKLKPEMDEKGNLTTAGFACSQCGQPLFVYKLEQVSEKGKAYTNYFGRCNVAEHEKLILLDQLKPEKDSDEAVTYSLGKFGQRALDFYSIHVTKESTHPVKPLAQIAGNRYASGPVGKALSDACMGTIASFLSKYQDIIIEHQKVVKGNQKRLESLRELAGKENLEYPSVTLPPQPHTKEGVDAYNEVIARVRMWVNLNLWQKLKLSRDDAKPLLRLKGFPSFPLVERQANEVDWWDMVCNVKKLINEKKEDGKVFWQNLAGYKRQEALRPYLSSEEDRKKGKKFARYQLGDLLLHLEKKHGEDWGKVYDEAWERIDKKVEGLSKHIKLEEERRSEDAQSKAALTDWLRAKASFVIEGLKEADKDEFCRCELKLQKWYGDLRGKPFAIEAENSILDISGFSKQYNCAFIWQKDGVKKLNLYLIINYFKGGKLRFKKIKPEAFEANRFYTVINKKSGEIVPMEVNFNFDDPNLIILPLAFGKRQGREFIWNDLLSLETGSLKLANGRVIEKTLYNRRTRQDEPALFVALTFERREVLDSSNIKPMNLIGVDRGENIPAVIALTDPEGCPLSRFKDSLGNPTHILRIGESYKEKQRTIQAKKEVEQRRAGGYSRKYASKAKNLADDMVRNTARDLLYYAVTQDAMLIFENLSRGFGRQGKRTFMAERQYTRMEDWLTAKLAYEGLPSKTYLSKTLAQYTSKTCSNCGFTITSADYDRVLEKLKKTATGWMTTINGKELKVEGQITYYNRYKRQNVVKDLSVELDRLSEESVNNDISSWTKGRSGEALSLLKKRFSHRPVQEKFVCLNCGFETHADEQAALNIARSWLFLRSQEYKKYQTNKTTGNTDKRAFVETWQSFYRKKLKEVWKPAV

SEQ ID NO: 455 - protein, 978 aa, synthetic construct
  REGION 1..978: note = CasX variant
QEIKRINKIRRRLVKDSNTKKAGKTGPMKTLLVRVMTPDLRERLENLRKKPENIPQPISNTSRANLNKLLTDYTEMKKAILHVYWEEFQKDPVGLMSRVAQPASKKIDQNKLKPEMDEKGNLTTAGFACSQCGQPLFVYKLEQVSEKGKAYTNYFGRCNVAEHEKLIPLAQLKPEKDSDEAVTYSLGKFGQRALDFYSIHVTKESTHPVKPLAQIAGNRYASGPVGKALSDACMGTIASFLSKYQDIIIEHQKVVKGNQKRLESLRELAGKENLEYPSVTLPPQPHTKEGVDAYNEVIARVRMWVNLNLWQKLKLSRDDAKPLLRLKGFPSFPLVERQANEVDWWDMVCNVKKLINEKKEDGKVFWQNLAGYKRQEALRPYLSSEEDRKKGKKFARYQLGDLLLHLEKKHGEDWGKVYDEAWERIDKKVEGLSKHIKLEEERRSEDAQSKAALTDWLRAKASFVIEGLKEADKDEFCRCELKLQKWYGDLRGKPFAIEAENSILDISGFSKQYNCAFIWQKDGVKKLNLYLIINYFKGGKLRFKKIKPEAFEANRFYTVINKKSGEIVPMEVNFNFDDPNLIILPLAFGKRQGREFIWNDLLSLETGSLKLANGRVIEKTLYNRRTRQDEPALFVALTFERREVLDSSNIKPMNLIGVDRGENIPAVIALTDPEGCPLSRFKDSLGNPTHILRIGESYKEKQRTIQAKKEVEQRRAGGYSRKYASKAKNLADDMVRNTARDLLYYAVTQDAMLIFENLSRGFGRQGKRTFMAERQYTRMEDWLTAKLAYEGLPSKTYLSKTLAQYTSKTCSNCGFTITSADYDRVLEKLKKTATGWMTTINGKELKVEGQITYYNRYKRQNVVKDLSVELDRLSEESVNNDISSWTKGRSGEALSLLKKRFSHRPVQEKFVCLNCGFETHADEQAALNIARSWLFLRSQEYKKYQTNKTTGNTDKRAFVETWQSFYRKKLKEVWKPAV

SEQ ID NO: 456 - protein, 978 aa, synthetic construct
  REGION 1..978: note = CasX variant
QEIKRINKIRRRLVKDSNTKKAGKTGPMKTLLVRVMTPDLRERLENLRKKPENIPQPISNTSRANLNKLLTDYTEMKKAILHVYWEEFQKDPVGLMSRVAQPASKKIDQNKLKPEMDEKGNLTTAGFACSQCGQPLFVYKLEQVSEKGKAYTNYFGRCNVAEHEKLILLAQLKPEKDSDEAVTYSLGKFGQRALDFYSIHVTKESTHPVKPLAQIAGNRYASGPVGKALSDACMGTIASFLSKYQDIIIEHQKVVKGNQKRLESLRELAGKENLEYPSVTLPPQPHTKEGVDAYNEVIARVRMWVNLNLWQKLKLSRDDAKPLLRLKGFPSFPLVERQANEVDWWDMVCNVKKLINEKKEDGKVFWQNLAGYKRQEALRPYLSSEEDRKKGKKFARYQLGDLLLHLEKKHGEDWGKVYDEAWERIDKKVEGLSKHIKLEEERRSEDAQSKAALTDWLRAKASFVIEGLKEADKDEFCRCELKLQKWYGDLRGKPFAIEAENSILDISGFSKQYNCAFIWQKDGVKKLNLYLIINYFKGGKLRFKKIKPEAFEANRFYTVINKKSGEIVPMEVNFNFDDPNLIILPLAFGKRQGREFIWNDLLSLETGSLKLANGRVIEKTLYNRRTRQDEPALFVALTFERREVLDSSNIKPMNLIGVDRGENIPAVIALTDPEGCPLSRFKDSLGNPTHILRIGESYKEKQRTIQAKKEVEQRRAGGYSRKYASKAKNLADDMVRNTARDLLYYAVTQDAMLIFENLSRGFGRQGKRTFMAERQYTRMEDWLTAKKAYEGLPSKTYLSKTLAQYTSKTCSNCGFTITSADYDRVLEKLKKTATGWMTTINGKELKVEGQITYYNRYKRQNVVKDLSVELDRLSEESVNNDISSWTKGRSGEALSLLKKRFSHRPVQEKFVCLNCGFETHADEQAALNIARSWLFLRSQEYKKYQTNKTTGNTDKRAFVETWQSFYRKKLKEVWKPAV

SEQ ID NO: 457 - protein, 978 aa, synthetic construct
  REGION 1..978: note = CasX variant
QEIKRINKIRRRLVKDSNTKKAGKTGPMKTLLVRVMTPDLRERLENLRKKPENIPQPISNTSRANLNKLLTDYTEMKKAILHVYWEEFQKDPVGLMSRVAQPASKKIDQNKLKPEMDEKGNLTTAGFACSQCGQPLFVYKLEQVSEKGKAYTNYFGRCNVAEHEKLILLAQLKPEKDSDEAVTYSLGKFGQRALDFYSIHVTKESTHPVKPLAQIAGNRYASGPVGKALSDACMGTIASFLSKYQDIIIEHQKVVKGNQKRLESLRELAGKENLEYPSVTLPPQPHTKEGVDAYNEVIARVRMWVNLNLWQKLKLSRDDAKPLLRLKGFPSFPLVERQANEVDWWDMVCNVKKLINEKKEDGKVFWQNLAGYKRQEALRPYLSSEEDRKKGKKFARYQLGDLLLHLEKKHGEDWGKVYDEAWERIDKKVEGLSKHIKLEEERRSEDAQSKAALTDWLRAKASFVIEGLKEADKDEFCRCELKLQKWYGDLRGKPFAIEAENSILDISGFSKQYNCAFIWQKDGVKKLNLYLIINYFKGGKLRFKKIKPEAFEANRFYTVINKKSGEIVPMEVNFNFDDPNLIILPLAFGKRQGREFIWNDLLSLETGSLKLANGRVIEKTLYNRRTRQDEPALFVALTFERREVLDSSNIKPMNLIGVDRGENIPAVIALTDPEGCPLSRFKDSLGNPTHILRIGESYKEKQRTIQAKKEVEQRRAGGYSRKYASKAKNLADDMVRNTARDLLYYAVTQDAMLIFENLSRGFGRQGKRTFMAERQYTRMEDWLTAKLKYEGLPSKTYLSKTLAQYTSKTCSNCGFTITSADYDRVLEKLKKTATGWMTTINGKELKVEGQITYYNRYKRQNVVKDLSVELDRLSEESVNNDISSWTKGRSGEALSLLKKRFSHRPVQEKFVCLNCGFETHADEQAALNIARSWLFLRSQEYKKYQTNKTTGNTDKRAFVETWQSFYRKKLKEVWKPAV

SEQ ID NO: 458 - protein, 978 aa, synthetic construct
  REGION 1..978: note = CasX variant
QEGKRINKIRRRLVKDSNTKKAGKTGPMKTLLVRVMTPDLRERLENLRKKPENIPQPISNTSRANLNKLLTDYTEMKKAILHVYWEEFQKDPVGLMSRVAQPASKKIDQNKLKPEMDEKGNLTTAGFACSQCGQPLFVYKLEQVSEKGKAYTNYFGRCNVAEHEKLILLAQLKPEKDSDEAVTYSLGKFGQRALDFYSIHVTKESTHPVKPLAQIAGNRYASGPVGKALSDACMGTIASFLSKYQDIIIEHQKVVKGNQKRLESLRELAGKENLEYPSVTLPPQPHTKEGVDAYNEVIARVRMWVNLNLWQKLKLSRDDAKPLLRLKGFPSFPLVERQANEVDWWDMVCNVKKLINEKKEDGKVFWQNLAGYKRQEALRPYLSSEEDRKKGKKFARYQLGDLLLHLEKKHGEDWGKVYDEAWERIDKKVEGLSKHIKLEEERRSEDAQSKAALTDWLRAKASFVIEGLKEADKDEFCRCELKLQKWYGDLRGKPFAIEAENSILDISGFSKQYNCAFIWQKDGVKKLNLYLIINYFKGGKLRFKKIKPEAFEANRFYTVINKKSGEIVPMEVNFNFDDPNLIILPLAFGKRQGREFIWNDLLSLETGSLKLANGRVIEKTLYNRRTRQDEPALFVALTFERREVLDSSNIKPMNLIGVDRGENIPAVIALTDPEGCPLSRFKDSLGNPTHILRIGESYKEKQRTIQAKKEVEQRRAGGYSRKYASKAKNLADDMVRNTARDLLYYAVTQDAMLIFENLSRGFGRQGKRTFMAERQYTRMEDWLTAKLAYEGLPSKTYLSKTLAQYTSKTCSNCGFTITSADYDRVLEKLKKTATGWMTTINGKELKVEGQITYYNRYKRQNVVKDLSVELDRLSEESVNNDISSWTKGRSGEALSLLKKRFSHRPVQEKFVCLNCGFETHADEQAALNIARSWLFLRSQEYKKYQTNKTTGNTDKRAFVETWQSFYRKKLKEVWKPAV

SEQ ID NO: 459 - protein, 978 aa, synthetic construct
  REGION 1..978: note = CasX variant
QEEKRINKIRRRLVKDSNTKKAGKTGPMKTLLVRVMTPDLRERLENLRKKPENIPQPISNTSRANLNKLLTDYTEMKKAILHVYWEEFQKDPVGLMSRVAQPASKKIDQNKLKPEMDEKGNLTTAGFACSQCGQPLFVYKLEQVSEKGKAYTNYFGRCNVAEHEKLILLAQLKPEKDSDEAVTYSLGKFGQRALDFYSIHVTKESTHPVKPLAQIAGNRYASGPVGKALSDACMGTIASFLSKYQDIIIEHQKVVKGNQKRLESLRELAGKENLEYPSVTLPPQPHTKEGVDAYNEVIARVRMWVNLNLWQKLKLSRDDAKPLLRLKGFPSFPLVERQANEVDWWDMVCNVKKLINEKKEDGKVFWQNLAGYKRQEALRPYLSSEEDRKKGKKFARYQLGDLLLHLEKKHGEDWGKVYDEAWERIDKKVEGLSKHIKLEEERRSEDAQSKAALTDWLRAKASFVIEGLKEADKDEFCRCELKLQKWYGDLRGKPFAIEAENSILDISGFSKQYNCAFIWQKDGVKKLNLYLIINYFKGGKLRFKKIKPEAFEANRFYTVINKKSGEIVPMEVNFNFDDPNLIILPLAFGKRQGREFIWNDLLSLETGSLKLANGRVIEKTLYNRRTRQDEPALFVALTFERREVLDSSNIKPMNLIGVDRGENIPAVIALTDPEGCPLSRFKDSLGNPTHILRIGESYKEKQRTIQAKKEVEQRRAGGYSRKYASKAKNLADDMVRNTARDLLYYAVTQDAMLIFENLSRGFGRQGKRTFMAERQYTRMEDWLTAKLAYEGLPSKTYLSKTLAQYTSKTCSNCGFTITSADYDRVLEKLKKTATGWMTTINGKELKVEGQITYYNRYKRQNVVKDLSVELDRLSEESVNNDISSWTKGRSGEALSLLKKRFSHRPVQEKFVCLNCGFETHADEQAALNIARSWLFLRSQEYKKYQTNKTTGNTDKRAFVETWQSFYRKKLKEVWKPAV

SEQ ID NO: 460 - protein, 979 aa, synthetic construct
  REGION 1..979: note = CasX variant
QEIGKRINKIRRRLVKDSNTKKAGKTGPMKTLLVRVMTPDLRERLENLRKKPENIPQPISNTSRANLNKLLTDYTEMKKAILHVYWEEFQKDPVGLMSRVAQPASKKIDQNKLKPEMDEKGNLTTAGFACSQCGQPLFVYKLEQVSEKGKAYTNYFGRCNVAEHEKLILLAQLKPEKDSDEAVTYSLGKFGQRALDFYSIHVTKESTHPVKPLAQIAGNRYASGPVGKALSDACMGTIASFLSKYQDIIIEHQKVVKGNQKRLESLRELAGKENLEYPSVTLPPQPHTKEGVDAYNEVIARVRMWVNLNLWQKLKLSRDDAKPLLRLKGFPSFPLVERQANEVDWWDMVCNVKKLINEKKEDGKVFWQNLAGYKRQEALRPYLSSEEDRKKGKKFARYQLGDLLLHLEKKHGEDWGKVYDEAWERIDKKVEGLSKHIKLEEERRSEDAQSKAALTDWLRAKASFVIEGLKEADKDEFCRCELKLQKWYGDLRGKPFAIEAENSILDISGFSKQYNCAFIWQKDGVKKLNLYLIINYFKGGKLRFKKIKPEAFEANRFYTVINKKSGEIVPMEVNFNFDDPNLIILPLAFGKRQGREFIWNDLLSLETGSLKLANGRVIEKTLYNRRTRQDEPALFVALTFERREVLDSSNIKPMNLIGVDRGENIPAVIALTDPEGCPLSRFKDSLGNPTHILRIGESYKEKQRTIQAKKEVEQRRAGGYSRKYASKAKNLADDMVRNTARDLLYYAVTQDAMLIFENLSRGFGRQGKRTFMAERQYTRMEDWLTAKLAYEGLPSKTYLSKTLAQYTSKTCSNCGFTITSADYDRVLEKLKKTATGWMTTINGKELKVEGQITYYNRYKRQNVVKDLSVELDRLSEESVNNDISSWTKGRSGEALSLLKKRFSHRPVQEKFVCLNCGFETHADEQAALNIARSWLFLRSQEYKKYQTNKTTGNTDKRAFVETWQSFYRKKLKEVWKPAV

SEQ ID NO: 461 - protein, 978 aa, synthetic construct
  REGION 1..978: note = CasX variant
QEIGRINKIRRRLVKDSNTKKAGKTGPMKTLLVRVMTPDLRERLENLRKKPENIPQPISNTSRANLNKLLTDYTEMKKAILHVYWEEFQKDPVGLMSRVAQPASKKIDQNKLKPEMDEKGNLTTAGFACSQCGQPLFVYKLEQVSEKGKAYTNYFGRCNVAEHEKLILLAQLKPEKDSDEAVTYSLGKFGQRALDFYSIHVTKESTHPVKPLAQIAGNRYASGPVGKALSDACMGTIASFLSKYQDIIIEHQKVVKGNQKRLESLRELAGKENLEYPSVTLPPQPHTKEGVDAYNEVIARVRMWVNLNLWQKLKLSRDDAKPLLRLKGFPSFPLVERQANEVDWWDMVCNVKKLINEKKEDGKVFWQNLAGYKRQEALRPYLSSEEDRKKGKKFARYQLGDLLLHLEKKHGEDWGKVYDEAWERIDKKVEGLSKHIKLEEERRSEDAQSKAALTDWLRAKASFVIEGLKEADKDEFCRCELKLQKWYGDLRGKPFAIEAENSILDISGFSKQYNCAFIWQKDGVKKLNLYLIINYFKGGKLRFKKIKPEAFEANRFYTVINKKSGEIVPMEVNFNFDDPNLIILPLAFGKRQGREFIWNDLLSLETGSLKLANGRVIEKTLYNRRTRQDEPALFVALTFERREVLDSSNIKPMNLIGVDRGENIPAVIALTDPEGCPLSRFKDSLGNPTHILRIGESYKEKQRTIQAKKEVEQRRAGGYSRKYASKAKNLADDMVRNTARDLLYYAVTQDAMLIFENLSRGFGRQGKRTFMAERQYTRMEDWLTAKLAYEGLPSKTYLSKTLAQYTSKTCSNCGFTITSADYDRVLEKLKKTATGWMTTINGKELKVEGQITYYNRYKRQNVVKDLSVELDRLSEESVNNDISSWTKGRSGEALSLLKKRFSHRPVQEKFVCLNCGFETHADEQAALNIARSWLFLRSQEYKKYQTNKTTGNTDKRAFVETWQSFYRKKLKEVWKPAV

SEQ ID NO: 462 - protein, 978 aa, synthetic construct
  REGION 1..978: note = CasX variant
QEISRINKIRRRLVKDSNTKKAGKTGPMKTLLVRVMTPDLRERLENLRKKPENIPQPISNTSRANLNKLLTDYTEMKKAILHVYWEEFQKDPVGLMSRVAQPASKKIDQNKLKPEMDEKGNLTTAGFACSQCGQPLFVYKLEQVSEKGKAYTNYFGRCNVAEHEKLILLAQLKPEKDSDEAVTYSLGKFGQRALDFYSIHVTKESTHPVKPLAQIAGNRYASGPVGKALSDACMGTIASFLSKYQDIIIEHQKVVKGNQKRLESLRELAGKENLEYPSVTLPPQPHTKEGVDAYNEVIARVRMWVNLNLWQKLKLSRDDAKPLLRLKGFPSFPLVERQANEVDWWDMVCNVKKLINEKKEDGKVFWQNLAGYKRQEALRPYLSSEEDRKKGKKFARYQLGDLLLHLEKKHGEDWGKVYDEAWERIDKKVEGLSKHIKLEEERRSEDAQSKAALTDWLRAKASFVIEGLKEADKDEFCRCELKLQKWYGDLRGKPFAIEAENSILDISGFSKQYNCAFIWQKDGVKKLNLYLIINYFKGGKLRFKKIKPEAFEANRFYTVINKKSGEIVPMEVNFNFDDPNLIILPLAFGKRQGREFIWNDLLSLETGSLKLANGRVIEKTLYNRRTRQDEPALFVALTFERREVLDSSNIKPMNLIGVDRGENIPAVIALTDPEGCPLSRFKDSLGNPTHILRIGESYKEKQRTIQAKKEVEQRRAGGYSRKYASKAKNLADDMVRNTARDLLYYAVTQDAMLIFENLSRGFGRQGKRTFMAERQYTRMEDWLTAKLAYEGLPSKTYLSKTLAQYTSKTCSNCGFTITSADYDRVLEKLKKTATGWMTTINGKELKVEGQITYYNRYKRQNVVKDLSVELDRLSEESVNNDISSWTKGRSGEALSLLKKRFSHRPVQEKFVCLNCGFETHADEQAALNIARSWLFLRSQEYKKYQTNKTTGNTDKRAFVETWQSFYRKKLKEVWKPAV

SEQ ID NO: 463 - protein, 979 aa, synthetic construct
  REGION 1..979: note = CasX variant
QEIKGRINKIRRRLVKDSNTKKAGKTGPMKTLLVRVMTPDLRERLENLRKKPENIPQPISNTSRANLNKLLTDYTEMKKAILHVYWEEFQKDPVGLMSRVAQPASKKIDQNKLKPEMDEKGNLTTAGFACSQCGQPLFVYKLEQVSEKGKAYTNYFGRCNVAEHEKLILLAQLKPEKDSDEAVTYSLGKFGQRALDFYSIHVTKESTHPVKPLAQIAGNRYASGPVGKALSDACMGTIASFLSKYQDIIIEHQKVVKGNQKRLESLRELAGKENLEYPSVTLPPQPHTKEGVDAYNEVIARVRMWVNLNLWQKLKLSRDDAKPLLRLKGFPSFPLVERQANEVDWWDMVCNVKKLINEKKEDGKVFWQNLAGYKRQEALRPYLSSEEDRKKGKKFARYQLGDLLLHLEKKHGEDWGKVYDEAWERIDKKVEGLSKHIKLEEERRSEDAQSKAALTDWLRAKASFVIEGLKEADKDEFCRCELKLQKWYGDLRGKPFAIEAENSILDISGFSKQYNCAFIWQKDGVKKLNLYLIINYFKGGKLRFKKIKPEAFEANRFYTVINKKSGEIVPMEVNFNFDDPNLIILPLAFGKRQGREFIWNDLLSLETGSLKLANGRVIEKTLYNRRTRQDEPALFVALTFERREVLDSSNIKPMNLIGVDRGENIPAVIALTDPEGCPLSRFKDSLGNPTHILRIGESYKEKQRTIQAKKEVEQRRAGGYSRKYASKAKNLADDMVRNTARDLLYYAVTQDAMLIFENLSRGFGRQGKRTFMAERQYTRMEDWLTAKLAYEGLPSKTYLSKTLAQYTSKTCSNCGFTITSADYDRVLEKLKKTATGWMTTINGKELKVEGQITYYNRYKRQNVVKDLSVELDRLSEESVNNDISSWTKGRSGEALSLLKKRFSHRPVQEKFVCLNCGFETHADEQAALNIARSWLFLRSQEYKKYQTNKTTGNTDKRAFVETWQSFYRKKLKEVWKPAV

SEQ ID NO: 464 - protein, 978 aa, synthetic construct
  REGION 1..978: note = CasX variant
QEIKSINKIRRRLVKDSNTKKAGKTGPMKTLLVRVMTPDLRERLENLRKKPENIPQPISNTSRANLNKLLTDYTEMKKAILHVYWEEFQKDPVGLMSRVAQPASKKIDQNKLKPEMDEKGNLTTAGFACSQCGQPLFVYKLEQVSEKGKAYTNYFGRCNVAEHEKLILLAQLKPEKDSDEAVTYSLGKFGQRALDFYSIHVTKESTHPVKPLAQIAGNRYASGPVGKALSDACMGTIASFLSKYQDIIIEHQKVVKGNQKRLESLRELAGKENLEYPSVTLPPQPHTKEGVDAYNEVIARVRMWVNLNLWQKLKLSRDDAKPLLRLKGFPSFPLVERQANEVDWWDMVCNVKKLINEKKEDGKVFWQNLAGYKRQEALRPYLSSEEDRKKGKKFARYQLGDLLLHLEKKHGEDWGKVYDEAWERIDKKVEGLSKHIKLEEERRSEDAQSKAALTDWLRAKASFVIEGLKEADKDEFCRCELKLQKWYGDLRGKPFAIEAENSILDISGFSKQYNCAFIWQKDGVKKLNLYLIINYFKGGKLRFKKIKPEAFEANRFYTVINKKSGEIVPMEVNFNFDDPNLIILPLAFGKRQGREFIWNDLLSLETGSLKLANGRVIEKTLYNRRTRQDEPALFVALTFERREVLDSSNIKPMNLIGVDRGENIPAVIALTDPEGCPLSRFKDSLGNPTHILRIGESYKEKQRTIQAKKEVEQRRAGGYSRKYASKAKNLADDMVRNTARDLLYYAVTQDAMLIFENLSRGFGRQGKRTFMAERQYTRMEDWLTAKLAYEGLPSKTYLSKTLAQYTSKTCSNCGFTITSADYDRVLEKLKKTATGWMTTINGKELKVEGQITYYNRYKRQNVVKDLSVELDRLSEESVNNDISSWTKGRSGEALSLLKKRFSHRPVQEKFVCLNCGFETHADEQAALNIARSWLFLRSQEYKKYQTNKTTGNTDKRAFVETWQSFYRKKLKEVWKPAV

SEQ ID NO: 465 - protein, 978 aa, synthetic construct
  REGION 1..978: note = CasX variant
QEIKRANKIRRRLVKDSNTKKAGKTGPMKTLLVRVMTPDLRERLENLRKKPENIPQPISNTSRANLNKLLTDYTEMKKAILHVYWEEFQKDPVGLMSRVAQPASKKIDQNKLKPEMDEKGNLTTAGFACSQCGQPLFVYKLEQVSEKGKAYTNYFGRCNVAEHEKLILLAQLKPEKDSDEAVTYSLGKFGQRALDFYSIHVTKESTHPVKPLAQIAGNRYASGPVGKALSDACMGTIASFLSKYQDIIIEHQKVVKGNQKRLESLRELAGKENLEYPSVTLPPQPHTKEGVDAYNEVIARVRMWVNLNLWQKLKLSRDDAKPLLRLKGFPSFPLVERQANEVDWWDMVCNVKKLINEKKEDGKVFWQNLAGYKRQEALRPYLSSEEDRKKGKKFARYQLGDLLLHLEKKHGEDWGKVYDEAWERIDKKVEGLSKHIKLEEERRSEDAQSKAALTDWLRAKASFVIEGLKEADKDEFCRCELKLQKWYGDLRGKPFAIEAENSILDISGFSKQYNCAFIWQKDGVKKLNLYLIINYFKGGKLRFKKIKPEAFEANRFYTVINKKSGEIVPMEVNFNFDDPNLIILPLAFGKRQGREFIWNDLLSLETGSLKLANGRVIEKTLYNRRTRQDEPALFVALTFERREVLDSSNIKPMNLIGVDRGENIPAVIALTDPEGCPLSRFKDSLGNPTHILRIGESYKEKQRTIQAKKEVEQRRAGGYSRKYASKAKNLADDMVRNTARDLLYYAVTQDAMLIFENLSRGFGRQGKRTFMAERQYTRMEDWLTAKLAYEGLPSKTYLSKTLAQYTSKTCSNCGFTITSADYDRVLEKLKKTATGWMTTINGKELKVEGQITYYNRYKRQNVVKDLSVELDRLSEESVNNDISSWTKGRSGEALSLLKKRFSHRPVQEKFVCLNCGFETHADEQAALNIARSWLFLRSQEYKKYQTNKTTGNTDKRAFVETWQSFYRKKLKEVWKPAV

SEQ ID NO: 466 - protein, 979 aa, synthetic construct
  REGION 1..979: note = CasX variant
QEIKRGINKIRRRLVKDSNTKKAGKTGPMKTLLVRVMTPDLRERLENLRKKPENIPQPISNTSRANLNKLLTDYTEMKKAILHVYWEEFQKDPVGLMSRVAQPASKKIDQNKLKPEMDEKGNLTTAGFACSQCGQPLFVYKLEQVSEKGKAYTNYFGRCNVAEHEKLILLAQLKPEKDSDEAVTYSLGKFGQRALDFYSIHVTKESTHPVKPLAQIAGNRYASGPVGKALSDACMGTIASFLSKYQDIIIEHQKVVKGNQKRLESLRELAGKENLEYPSVTLPPQPHTKEGVDAYNEVIARVRMWVNLNLWQKLKLSRDDAKPLLRLKGFPSFPLVERQANEVDWWDMVCNVKKLINEKKEDGKVFWQNLAGYKRQEALRPYLSSEEDRKKGKKFARYQLGDLLLHLEKKHGEDWGKVYDEAWERIDKKVEGLSKHIKLEEERRSEDAQSKAALTDWLRAKASFVIEGLKEADKDEFCRCELKLQKWYGDLRGKPFAIEAENSILDISGFSKQYNCAFIWQKDGVKKLNLYLIINYFKGGKLRFKKIKPEAFEANRFYTVINKKSGEIVPMEVNFNFDDPNLIILPLAFGKRQGREFIWNDLLSLETGSLKLANGRVIEKTLYNRRTRQDEPALFVALTFERREVLDSSNIKPMNLIGVDRGENIPAVIALTDPEGCPLSRFKDSLGNPTHILRIGESYKEKQRTIQAKKEVEQRRAGGYSRKYASKAKNLADDMVRNTARDLLYYAVTQDAMLIFENLSRGFGRQGKRTFMAERQYTRMEDWLTAKLAYEGLPSKTYLSKTLAQYTSKTCSNCGFTITSADYDRVLEKLKKTATGWMTTINGKELKVEGQITYYNRYKRQNVVKDLSVELDRLSEESVNNDISSWTKGRSGEALSLLKKRFSHRPVQEKFVCLNCGFETHADEQAALNIARSWLFLRSQEYKKYQTNKTTGNTDKRAFVETWQSFYRKKLKEVWKPAV

SEQ ID NO: 467 - protein, 978 aa, synthetic construct
  REGION 1..978: note = CasX variant
QEIKRISKIRRRLVKDSNTKKAGKTGPMKTLLVRVMTPDLRERLENLRKKPENIPQPISNTSRANLNKLLTDYTEMKKAILHVYWEEFQKDPVGLMSRVAQPASKKIDQNKLKPEMDEKGNLTTAGFACSQCGQPLFVYKLEQVSEKGKAYTNYFGRCNVAEHEKLILLAQLKPEKDSDEAVTYSLGKFGQRALDFYSIHVTKESTHPVKPLAQIAGNRYASGPVGKALSDACMGTIASFLSKYQDIIIEHQKVVKGNQKRLESLRELAGKENLEYPSVTLPPQPHTKEGVDAYNEVIARVRMWVNLNLWQKLKLSRDDAKPLLRLKGFPSFPLVERQANEVDWWDMVCNVKKLINEKKEDGKVFWQNLAGYKRQEALRPYLSSEEDRKKGKKFARYQLGDLLLHLEKKHGEDWGKVYDEAWERIDKKVEGLSKHIKLEEERRSEDAQSKAALTDWLRAKASFVIEGLKEADKDEFCRCELKLQKWYGDLRGKPFAIEAENSILDISGFSKQYNCAFIWQKDGVKKLNLYLIINYFKGGKLRFKKIKPEAFEANRFYTVINKKSGEIVPMEVNFNFDDPNLIILPLAFGKRQGREFIWNDLLSLETGSLKLANGRVIEKTLYNRRTRQDEPALFVALTFERREVLDSSNIKPMNLIGVDRGENIPAVIALTDPEGCPLSRFKDSLGNPTHILRIGESYKEKQRTIQAKKEVEQRRAGGYSRKYASKAKNLADDMVRNTARDLLYYAVTQDAMLIFENLSRGFGRQGKRTFMAERQYTRMEDWLTAKLAYEGLPSKTYLSKTLAQYTSKTCSNCGFTITSADYDRVLEKLKKTATGWMTTINGKELKVEGQITYYNRYKRQNVVKDLSVELDRLSEESVNNDISSWTKGRSGEALSLLKKRFSHRPVQEKFVCLNCGFETHADEQAALNIARSWLFLRSQEYKKYQTNKTTGNTDKRAFVETWQSFYRKKLKEVWKPAV

SEQ ID NO: 468 - protein, 978 aa, synthetic construct
  REGION 1..978: note = CasX variant
QEIKRINGIRRRLVKDSNTKKAGKTGPMKTLLVRVMTPDLRERLENLRKKPENIPQPISNTSRANLNKLLTDYTEMKKAILHVYWEEFQKDPVGLMSRVAQPASKKIDQNKLKPEMDEKGNLTTAGFACSQCGQPLFVYKLEQVSEKGKAYTNYFGRCNVAEHEKLILLAQLKPEKDSDEAVTYSLGKFGQRALDFYSIHVTKESTHPVKPLAQIAGNRYASGPVGKALSDACMGTIASFLSKYQDIIIEHQKVVKGNQKRLESLRELAGKENLEYPSVTLPPQPHTKEGVDAYNEVIARVRMWVNLNLWQKLKLSRDDAKPLLRLKGFPSFPLVERQANEVDWWDMVCNVKKLINEKKEDGKVFWQNLAGYKRQEALRPYLSSEEDRKKGKKFARYQLGDLLLHLEKKHGEDWGKVYDEAWERIDKKVEGLSKHIKLEEERRSEDAQSKAALTDWLRAKASFVIEGLKEADKDEFCRCELKLQKWYGDLRGKPFAIEAENSILDISGFSKQYNCAFIWQKDGVKKLNLYLIINYFKGGKLRFKKIKPEAFEANRFYTVINKKSGEIVPMEVNFNFDDPNLIILPLAFGKRQGREFIWNDLLSLETGSLKLANGRVIEKTLYNRRTRQDEPALFVALTFERREVLDSSNIKPMNLIGVDRGENIPAVIALTDPEGCPLSRFKDSLGNPTHILRIGESYKEKQRTIQAKKEVEQRRAGGYSRKYASKAKNLADDMVRNTARDLLYYAVTQDAMLIFENLSRGFGRQGKRTFMAERQYTRMEDWLTAKLAYEGLPSKTYLSKTLAQYTSKTCSNCGFTITSADYDRVLEKLKKTATGWMTTINGKELKVEGQITYYNRYKRQNVVKDLSVELDRLSEESVNNDISSWTKGRSGEALSLLKKRFSHRPVQEKFVCLNCGFETHADEQAALNIARSWLFLRSQEYKKYQTNKTTGNTDKRAFVETWQSFYRKKLKEVWKPAV

SEQ ID NO: 469 - protein, 979 aa, synthetic construct
  REGION 1..979: note = CasX variant
QEIKRINKIRRRLVKFDSNTKKAGKTGPMKTLLVRVMTPDLRERLENLRKKPENIPQPISNTSRANLNKLLTDYTEMKKAILHVYWEEFQKDPVGLMSRVAQPASKKIDQNKLKPEMDEKGNLTTAGFACSQCGQPLFVYKLEQVSEKGKAYTNYFGRCNVAEHEKLILLAQLKPEKDSDEAVTYSLGKFGQRALDFYSIHVTKESTHPVKPLAQIAGNRYASGPVGKALSDACMGTIASFLSKYQDIIIEHQKVVKGNQKRLESLRELAGKENLEYPSVTLPPQPHTKEGVDAYNEVIARVRMWVNLNLWQKLKLSRDDAKPLLRLKGFPSFPLVERQANEVDWWDMVCNVKKLINEKKEDGKVFWQNLAGYKRQEALRPYLSSEEDRKKGKKFARYQLGDLLLHLEKKHGEDWGKVYDEAWERIDKKVEGLSKHIKLEEERRSEDAQSKAALTDWLRAKASFVIEGLKEADKDEFCRCELKLQKWYGDLRGKPFAIEAENSILDISGFSKQYNCAFIWQKDGVKKLNLYLIINYFKGGKLRFKKIKPEAFEANRFYTVINKKSGEIVPMEVNFNFDDPNLIILPLAFGKRQGREFIWNDLLSLETGSLKLANGRVIEKTLYNRRTRQDEPALFVALTFERREVLDSSNIKPMNLIGVDRGENIPAVIALTDPEGCPLSRFKDSLGNPTHILRIGESYKEKQRTIQAKKEVEQRRAGGYSRKYASKAKNLADDMVRNTARDLLYYAVTQDAMLIFENLSRGFGRQGKRTFMAERQYTRMEDWLTAKLAYEGLPSKTYLSKTLAQYTSKTCSNCGFTITSADYDRVLEKLKKTATGWMTTINGKELKVEGQITYYNRYKRQNVVKDLSVELDRLSEESVNNDISSWTKGRSGEALSLLKKRFSHRPVQEKFVCLNCGFETHADEQAALNIARSWLFLRSQEYKKYQTNKTTGNTDKRAFVETWQSFYRKKLKEVWKPAV

SEQ ID NO: 470 - protein, 979 aa, synthetic construct
  REGION 1..979: note = CasX variant
QEIKRINKIRRRLVKDSFNTKKAGKTGPMKTLLVRVMTPDLRERLENLRKKPENIPQPISNTSRANLNKLLTDYTEMKKAILHVYWEEFQKDPVGLMSRVAQPASKKIDQNKLKPEMDEKGNLTTAGFACSQCGQPLFVYKLEQVSEKGKAYTNYFGRCNVAEHEKLILLAQLKPEKDSDEAVTYSLGKFGQRALDFYSIHVTKESTHPVKPLAQIAGNRYASGPVGKALSDACMGTIASFLSKYQDIIIEHQKVVKGNQKRLESLRELAGKENLEYPSVTLPPQPHTKEGVDAYNEVIARVRMWVNLNLWQKLKLSRDDAKPLLRLKGFPSFPLVERQANEVDWWDMVCNVKKLINEKKEDGKVFWQNLAGYKRQEALRPYLSSEEDRKKGKKFARYQLGDLLLHLEKKHGEDWGKVYDEAWERIDKKVEGLSKHIKLEEERRSEDAQSKAALTDWLRAKASFVIEGLKEADKDEFCRCELKLQKWYGDLRGKPFAIEAENSILDISGFSKQYNCAFIWQKDGVKKLNLYLIINYFKGGKLRFKKIKPEAFEANRFYTVINKKSGEIVPMEVNFNFDDPNLIILPLAFGKRQGREFIWNDLLSLETGSLKLANGRVIEKTLYNRRTRQDEPALFVALTFERREVLDSSNIKPMNLIGVDRGENIPAVIALTDPEGCPLSRFKDSLGNPTHILRIGESYKEKQRTIQAKKEVEQRRAGGYSRKYASKAKNLADDMVRNTARDLLYYAVTQDAMLIFENLSRGFGRQGKRTFMAERQYTRMEDWLTAKLAYEGLPSKTYLSKTLAQYTSKTCSNCGFTITSADYDRVLEKLKKTATGWMTTINGKELKVEGQITYYNRYKRQNVVKDLSVELDRLSEESVNNDISSWTKGRSGEALSLLKKRFSHRPVQEKFVCLNCGFETHADEQAALNIARSWLFLRSQEYKKYQTNKTTGNTDKRAFVETWQSFYRKKLKEVWKPAV

SEQ ID NO: 471 - protein, 978 aa, synthetic construct
  REGION 1..978: note = CasX variant
QEIKRINKIRRRLVKDSNTKKAGKTGPMKTLLVPVMTPDLRERLENLRKKPENIPQPISNTSRANLNKLLTDYTEMKKAILHVYWEEFQKDPVGLMSRVAQPASKKIDQNKLKPEMDEKGNLTTAGFACSQCGQPLFVYKLEQVSEKGKAYTNYFGRCNVAEHEKLILLAQLKPEKDSDEAVTYSLGKFGQRALDFYSIHVTKESTHPVKPLAQIAGNRYASGPVGKALSDACMGTIASFLSKYQDIIIEHQKVVKGNQKRLESLRELAGKENLEYPSVTLPPQPHTKEGVDAYNEVIARVRMWVNLNLWQKLKLSRDDAKPLLRLKGFPSFPLVERQANEVDWWDMVCNVKKLINEKKEDGKVFWQNLAGYKRQEALRPYLSSEEDRKKGKKFARYQLGDLLLHLEKKHGEDWGKVYDEAWERIDKKVEGLSKHIKLEEERRSEDAQSKAALTDWLRAKASFVIEGLKEADKDEFCRCELKLQKWYGDLRGKPFAIEAENSILDISGFSKQYNCAFIWQKDGVKKLNLYLIINYFKGGKLRFKKIKPEAFEANRFYTVINKKSGEIVPMEVNFNFDDPNLIILPLAFGKRQGREFIWNDLLSLETGSLKLANGRVIEKTLYNRRTRQDEPALFVALTFERREVLDSSNIKPMNLIGVDRGENIPAVIALTDPEGCPLSRFKDSLGNPTHILRIGESYKEKQRTIQAKKEVEQRRAGGYSRKYASKAKNLADDMVRNTARDLLYYAVTQDAMLIFENLSRGFGRQGKRTFMAERQYTRMEDWLTAKLAYEGLPSKTYLSKTLAQYTSKTCSNCGFTITSADYDRVLEKLKKTATGWMTTINGKELKVEGQITYYNRYKRQNVVKDLSVELDRLSEESVNNDISSWTKGRSGEALSLLKKRFSHRPVQEKFVCLNCGFETHADEQAALNIARSWLFLRSQEYKKYQTNKTTGNTDKRAFVETWQSFYRKKLKEVWKPAV

SEQ ID NO: 472 - protein, 978 aa, synthetic construct
  REGION 1..978: note = CasX variant
QEIKRINKIRRRLVKDSNTKKAGKTGPMKTLLVRVMTPDLRERLENLRKKPPNIPQPISNTSRANLNKLLTDYTEMKKAILHVYWEEFQKDPVGLMSRVAQPASKKIDQNKLKPEMDEKGNLTTAGFACSQCGQPLFVYKLEQVSEKGKAYTNYFGRCNVAEHEKLILLAQLKPEKDSDEAVTYSLGKFGQRALDFYSIHVTKESTHPVKPLAQIAGNRYASGPVGKALSDACMGTIASFLSKYQDIIIEHQKVVKGNQKRLESLRELAGKENLEYPSVTLPPQPHTKEGVDAYNEVIARVRMWVNLNLWQKLKLSRDDAKPLLRLKGFPSFPLVERQANEVDWWDMVCNVKKLINEKKEDGKVFWQNLAGYKRQEALRPYLSSEEDRKKGKKFARYQLGDLLLHLEKKHGEDWGKVYDEAWERIDKKVEGLSKHIKLEEERRSEDAQSKAALTDWLRAKASFVIEGLKEADKDEFCRCELKLQKWYGDLRGKPFAIEAENSILDISGFSKQYNCAFIWQKDGVKKLNLYLIINYFKGGKLRFKKIKPEAFEANRFYTVINKKSGEIVPMEVNFNFDDPNLIILPLAFGKRQGREFIWNDLLSLETGSLKLANGRVIEKTLYNRRTRQDEPALFVALTFERREVLDSSNIKPMNLIGVDRGENIPAVIALTDPEGCPLSRFKDSLGNPTHILRIGESYKEKQRTIQAKKEVEQRRAGGYSRKYASKAKNLADDMVRNTARDLLYYAVTQDAMLIFENLSRGFGRQGKRTFMAERQYTRMEDWLTAKLAYEGLPSKTYLSKTLAQYTSKTCSNCGFTITSADYDRVLEKLKKTATGWMTTINGKELKVEGQITYYNRYKRQNVVKDLSVELDRLSEESVNNDISSWTKGRSGEALSLLKKRFSHRPVQEKFVCLNCGFETHADEQAALNIARSWLFLRSQEYKKYQTNKTTGNTDKRAFVETWQSFYRKKLKEVWKPAV

SEQ ID NO: 473 - protein, 979 aa, synthetic construct
  REGION 1..979: note = CasX variant
QEIKRINKIRRRLVKDSNTKKAGKTGPMKTLLVRVMTPDLRERLENLRKKPENIPPQPISNTSRANLNKLLTDYTEMKKAILHVYWEEFQKDPVGLMSRVAQPASKKIDQNKLKPEMDEKGNLTTAGFACSQCGQPLFVYKLEQVSEKGKAYTNYFGRCNVAEHEKLILLAQLKPEKDSDEAVTYSLGKFGQRALDFYSIHVTKESTHPVKPLAQIAGNRYASGPVGKALSDACMGTIASFLSKYQDIIIEHQKVVKGNQKRLESLRELAGKENLEYPSVTLPPQPHTKEGVDAYNEVIARVRMWVNLNLWQKLKLSRDDAKPLLRLKGFPSFPLVERQANEVDWWDMVCNVKKLINEKKEDGKVFWQNLAGYKRQEALRPYLSSEEDRKKGKKFARYQLGDLLLHLEKKHGEDWGKVYDEAWERIDKKVEGLSKHIKLEEERRSEDAQSKAALTDWLRAKASFVIEGLKEADKDEFCRCELKLQKWYGDLRGKPFAIEAENSILDISGFSKQYNCAFIWQKDGVKKLNLYLIINYFKGGKLRFKKIKPEAFEANRFYTVINKKSGEIVPMEVNFNFDDPNLIILPLAFGKRQGREFIWNDLLSLETGSLKLANGRVIEKTLYNRRTRQDEPALFVALTFERREVLDSSNIKPMNLIGVDRGENIPAVIALTDPEGCPLSRFKDSLGNPTHILRIGESYKEKQRTIQAKKEVEQRRAGGYSRKYASKAKNLADDMVRNTARDLLYYAVTQDAMLIFENLSRGFGRQGKRTFMAERQYTRMEDWLTAKLAYEGLPSKTYLSKTLAQYTSKTCSNCGFTITSADYDRVLEKLKKTATGWMTTINGKELKVEGQITYYNRYKRQNVVKDLSVELDRLSEESVNNDISSWTKGRSGEALSLLKKRFSHRPVQEKFVCLNCGFETHADEQAALNIARSWLFLRSQEYKKYQTNKTTGNTDKRAFVETWQSFYRKKLKEVWKPAV

SEQ ID NO: 474 - protein, 978 aa, synthetic construct
  REGION 1..978: note = CasX variant
QEIKRINKIRRRLVKDSNTKKAGKTGPMKTLLVRVMTPDLRERLENLRKKPENIPPPISNTSRANLNKLLTDYTEMKKAILHVYWEEFQKDPVGLMSRVAQPASKKIDQNKLKPEMDEKGNLTTAGFACSQCGQPLFVYKLEQVSEKGKAYTNYFGRCNVAEHEKLILLAQLKPEKDSDEAVTYSLGKFGQRALDFYSIHVTKESTHPVKPLAQIAGNRYASGPVGKALSDACMGTIASFLSKYQDIIIEHQKVVKGNQKRLESLRELAGKENLEYPSVTLPPQPHTKEGVDAYNEVIARVRMWVNLNLWQKLKLSRDDAKPLLRLKGFPSFPLVERQANEVDWWDMVCNVKKLINEKKEDGKVFWQNLAGYKRQEALRPYLSSEEDRKKGKKFARYQLGDLLLHLEKKHGEDWGKVYDEAWERIDKKVEGLSKHIKLEEERRSEDAQSKAALTDWLRAKASFVIEGLKEADKDEFCRCELKLQKWYGDLRGKPFAIEAENSILDISGFSKQYNCAFIWQKDGVKKLNLYLIINYFKGGKLRFKKIKPEAFEANRFYTVINKKSGEIVPMEVNFNFDDPNLIILPLAFGKRQGREFIWNDLLSLETGSLKLANGRVIEKTLYNRRTRQDEPALFVALTFERREVLDSSNIKPMNLIGVDRGENIPAVIALTDPEGCPLSRFKDSLGNPTHILRIGESYKEKQRTIQAKKEVEQRRAGGYSRKYASKAKNLADDMVRNTARDLLYYAVTQDAMLIFENLSRGFGRQGKRTFMAERQYTRMEDWLTAKLAYEGLPSKTYLSKTLAQYTSKTCSNCGFTITSADYDRVLEKLKKTATGWMTTINGKELKVEGQITYYNRYKRQNVVKDLSVELDRLSEESVNNDISSWTKGRSGEALSLLKKRFSHRPVQEKFVCLNCGFETHADEQAALNIARSWLFLRSQEYKKYQTNKTTGNTDKRAFVETWQSFYRKKLKEVWKPAV

SEQ ID NO: 475 - protein, 978 aa, synthetic construct
  REGION 1..978: note = CasX variant
QEIKRINKIRRRLVKDSNTKKAGKTGPMKTLLVRVMTPDLRERLENLRKKPENIPQPISNTSSANLNKLLTDYTEMKKAILHVYWEEFQKDPVGLMSRVAQPASKKIDQNKLKPEMDEKGNLTTAGFACSQCGQPLFVYKLEQVSEKGKAYTNYFGRCNVAEHEKLILLAQLKPEKDSDEAVTYSLGKFGQRALDFYSIHVTKESTHPVKPLAQIAGNRYASGPVGKALSDACMGTIASFLSKYQDIIIEHQKVVKGNQKRLESLRELAGKENLEYPSVTLPPQPHTKEGVDAYNEVIARVRMWVNLNLWQKLKLSRDDAKPLLRLKGFPSFPLVERQANEVDWWDMVCNVKKLINEKKEDGKVFWQNLAGYKRQEALRPYLSSEEDRKKGKKFARYQLGDLLLHLEKKHGEDWGKVYDEAWERIDKKVEGLSKHIKLEEERRSEDAQSKAALTDWLRAKASFVIEGLKEADKDEFCRCELKLQKWYGDLRGKPFAIEAENSILDISGFSKQYNCAFIWQKDGVKKLNLYLIINYFKGGKLRFKKIKPEAFEANRFYTVINKKSGEIVPMEVNFNFDDPNLIILPLAFGKRQGREFIWNDLLSLETGSLKLANGRVIEKTLYNRRTRQDEPALFVALTFERREVLDSSNIKPMNLIGVDRGENIPAVIALTDPEGCPLSRFKDSLGNPTHILRIGESYKEKQRTIQAKKEVEQRRAGGYSRKYASKAKNLADDMVRNTARDLLYYAVTQDAMLIFENLSRGFGRQGKRTFMAERQYTRMEDWLTAKLAYEGLPSKTYLSKTLAQYTSKTCSNCGFTITSADYDRVLEKLKKTATGWMTTINGKELKVEGQITYYNRYKRQNVVKDLSVELDRLSEESVNNDISSWTKGRSGEALSLLKKRFSHRPVQEKFVCLNCGFETHADEQAALNIARSWLFLRSQEYKKYQTNKTTGNTDKRAFVETWQSFYRKKLKEVWKPAV

SEQ ID NO: 476 - protein, 978 aa, synthetic construct
  REGION 1..978: note = CasX variant
QEIKRINKIRRRLVKDSNTKKAGKTGPMKTLLVRVMTPDLRERLENLRKKPENIPQPISNTSQANLNKLLTDYTEMKKAILHVYWEEFQKDPVGLMSRVAQPASKKIDQNKLKPEMDEKGNLTTAGFACSQCGQPLFVYKLEQVSEKGKAYTNYFGRCNVAEHEKLILLAQLKPEKDSDEAVTYSLGKFGQRALDFYSIHVTKESTHPVKPLAQIAGNRYASGPVGKALSDACMGTIASFLSKYQDIIIEHQKVVKGNQKRLESLRELAGKENLEYPSVTLPPQPHTKEGVDAYNEVIARVRMWVNLNLWQKLKLSRDDAKPLLRLKGFPSFPLVERQANEVDWWDMVCNVKKLINEKKEDGKVFWQNLAGYKRQEALRPYLSSEEDRKKGKKFARYQLGDLLLHLEKKHGEDWGKVYDEAWERIDKKVEGLSKHIKLEEERRSEDAQSKAALTDWLRAKASFVIEGLKEADKDEFCRCELKLQKWYGDLRGKPFAIEAENSILDISGFSKQYNCAFIWQKDGVKKLNLYLIINYFKGGKLRFKKIKPEAFEANRFYTVINKKSGEIVPMEVNFNFDDPNLIILPLAFGKRQGREFIWNDLLSLETGSLKLANGRVIEKTLYNRRTRQDEPALFVALTFERREVLDSSNIKPMNLIGVDRGENIPAVIALTDPEGCPLSRFKDSLGNPTHILRIGESYKEKQRTIQAKKEVEQRRAGGYSRKYASKAKNLADDMVRNTARDLLYYAVTQDAMLIFENLSRGFGRQGKRTFMAERQYTRMEDWLTAKLAYEGLPSKTYLSKTLAQYTSKTCSNCGFTITSADYDRVLEKLKKTATGWMTTINGKELKVEGQITYYNRYKRQNVVKDLSVELDRLSEESVNNDISSWTKGRSGEALSLLKKRFSHRPVQEKFVCLNCGFETHADEQAALNIARSWLFLRSQEYKKYQTNKTTGNTDKRAFVETWQSFYRKKLKEVWKPAV

SEQ ID NO: 477 - protein, 978 aa, synthetic construct
  REGION 1..978: note = CasX variant
QEIKRINKIRRRLVKDSNTKKAGKTGPMKTLLVRVMTPDLRERLENLRKKPENIPQPISNTSRANLNKLLTDYTEMKKAITHVYWEEFQKDPVGLMSRVAQPASKKIDQNKLKPEMDEKGNLTTAGFACSQCGQPLFVYKLEQVSEKGKAYTNYFGRCNVAEHEKLILLAQLKPEKDSDEAVTYSLGKFGQRALDFYSIHVTKESTHPVKPLAQIAGNRYASGPVGKALSDACMGTIASFLSKYQDIIIEHQKVVKGNQKRLESLRELAGKENLEYPSVTLPPQPHTKEGVDAYNEVIARVRMWVNLNLWQKLKLSRDDAKPLLRLKGFPSFPLVERQANEVDWWDMVCNVKKLINEKKEDGKVFWQNLAGYKRQEALRPYLSSEEDRKKGKKFARYQLGDLLLHLEKKHGEDWGKVYDEAWERIDKKVEGLSKHIKLEEERRSEDAQSKAALTDWLRAKASFVIEGLKEADKDEFCRCELKLQKWYGDLRGKPFAIEAENSILDISGFSKQYNCAFIWQKDGVKKLNLYLIINYFKGGKLRFKKIKPEAFEANRFYTVINKKSGEIVPMEVNFNFDDPNLIILPLAFGKRQGREFIWNDLLSLETGSLKLANGRVIEKTLYNRRTRQDEPALFVALTFERREVLDSSNIKPMNLIGVDRGENIPAVIALTDPEGCPLSRFKDSLGNPTHILRIGESYKEKQRTIQAKKEVEQRRAGGYSRKYASKAKNLADDMVRNTARDLLYYAVTQDAMLIFENLSRGFGRQGKRTFMAERQYTRMEDWLTAKLAYEGLPSKTYLSKTLAQYTSKTCSNCGFTITSADYDRVLEKLKKTATGWMTTINGKELKVEGQITYYNRYKRQNVVKDLSVELDRLSEESVNNDISSWTKGRSGEALSLLKKRFSHRPVQEKFVCLNCGFETHADEQAALNIARSWLFLRSQEYKKYQTNKTTGNTDKRAFVETWQSFYRKKLKEVWKPAV

SEQ ID NO: 478 - protein, 978 aa, synthetic construct
  REGION 1..978: note = CasX variant
QEIKRINKIRRRLVKDSNTKKAGKTGPMKTLLVRVMTPDLRERLENLRKKPENIPQPISNTSRANLNKLLTDYTEMKKAILHVYGEEFQKDPVGLMSRVAQPASKKIDQNKLKPEMDEKGNLTTAGFACSQCGQPLFVYKLEQVSEKGKAYTNYFGRCNVAEHEKLILLAQLKPEKDSDEAVTYSLGKFGQRALDFYSIHVTKESTHPVKPLAQIAGNRYASGPVGKALSDACMGTIASFLSKYQDIIIEHQKVVKGNQKRLESLRELAGKENLEYPSVTLPPQPHTKEGVDAYNEVIARVRMWVNLNLWQKLKLSRDDAKPLLRLKGFPSFPLVERQANEVDWWDMVCNVKKLINEKKEDGKVFWQNLAGYKRQEALRPYLSSEEDRKKGKKFARYQLGDLLLHLEKKHGEDWGKVYDEAWERIDKKVEGLSKHIKLEEERRSEDAQSKAALTDWLRAKASFVIEGLKEADKDEFCRCELKLQKWYGDLRGKPFAIEAENSILDISGFSKQYNCAFIWQKDGVKKLNLYLIINYFKGGKLRFKKIKPEAFEANRFYTVINKKSGEIVPMEVNFNFDDPNLIILPLAFGKRQGREFIWNDLLSLETGSLKLANGRVIEKTLYNRRTRQDEPALFVALTFERREVLDSSNIKPMNLIGVDRGENIPAVIALTDPEGCPLSRFKDSLGNPTHILRIGESYKEKQRTIQAKKEVEQRRAGGYSRKYASKAKNLADDMVRNTARDLLYYAVTQDAMLIFENLSRGFGRQGKRTFMAERQYTRMEDWLTAKLAYEGLPSKTYLSKTLAQYTSKTCSNCGFTITSADYDRVLEKLKKTATGWMTTINGKELKVEGQITYYNRYKRQNVVKDLSVELDRLSEESVNNDISSWTKGRSGEALSLLKKRFSHRPVQEKFVCLNCGFETHADEQAALNIARSWLFLRSQEYKKYQTNKTTGNTDKRAFVETWQSFYRKKLKEVWKPAV

SEQ ID NO: 479 - protein, 978 aa, synthetic construct
  REGION 1..978: note = CasX variant
QEIKRINKIRRRLVKDSNTKKAGKTGPMKTLLVRVMTPDLRERLENLRKKPENIPQPISNTSRANLNKLLTDYTEMKKAILHVYDEEFQKDPVGLMSRVAQPASKKIDQNKLKPEMDEKGNLTTAGFACSQCGQPLFVYKLEQVSEKGKAYTNYFGRCNVAEHEKLILLAQLKPEKDSDEAVTYSLGKFGQRALDFYSIHVTKESTHPVKPLAQIAGNRYASGPVGKALSDACMGTIASFLSKYQDIIIEHQKVVKGNQKRLESLRELAGKENLEYPSVTLPPQPHTKEGVDAYNEVIARVRMWVNLNLWQKLKLSRDDAKPLLRLKGFPSFPLVERQANEVDWWDMVCNVKKLINEKKEDGKVFWQNLAGYKRQEALRPYLSSEEDRKKGKKFARYQLGDLLLHLEKKHGEDWGKVYDEAWERIDKKVEGLSKHIKLEEERRSEDAQSKAALTDWLRAKASFVIEGLKEADKDEFCRCELKLQKWYGDLRGKPFAIEAENSILDISGFSKQYNCAFIWQKDGVKKLNLYLIINYFKGGKLRFKKIKPEAFEANRFYTVINKKSGEIVPMEVNFNFDDPNLIILPLAFGKRQGREFIWNDLLSLETGSLKLANGRVIEKTLYNRRTRQDEPALFVALTFERREVLDSSNIKPMNLIGVDRGENIPAVIALTDPEGCPLSRFKDSLGNPTHILRIGESYKEKQRTIQAKKEVEQRRAGGYSRKYASKAKNLADDMVRNTARDLLYYAVTQDAMLIFENLSRGFGRQGKRTFMAERQYTRMEDWLTAKLAYEGLPSKTYLSKTLAQYTSKTCSNCGFTITSADYDRVLEKLKKTATGWMTTINGKELKVEGQITYYNRYKRQNVVKDLSVELDRLSEESVNNDISSWTKGRSGEALSLLKKRFSHRPVQEKFVCLNCGFETHADEQAALNIARSWLFLRSQEYKKYQTNKTTGNTDKRAFVETWQSFYRKKLKEVWKPAV

SEQ ID NO: 480 - protein, 978 aa, synthetic construct
  REGION 1..978: note = CasX variant
QEIKRINKIRRRLVKDSNTKKAGKTGPMKTLLVRVMTPDLRERLENLRKKPENIPQPISNTSRANLNKLLTDYTEMKKAILHVYAEEFQKDPVGLMSRVAQPASKKIDQNKLKPEMDEKGNLTTAGFACSQCGQPLFVYKLEQVSEKGKAYTNYFGRCNVAEHEKLILLAQLKPEKDSDEAVTYSLGKFGQRALDFYSIHVTKESTHPVKPLAQIAGNRYASGPVGKALSDACMGTIASFLSKYQDIIIEHQKVVKGNQKRLESLRELAGKENLEYPSVTLPPQPHTKEGVDAYNEVIARVRMWVNLNLWQKLKLSRDDAKPLLRLKGFPSFPLVERQANEVDWWDMVCNVKKLINEKKEDGKVFWQNLAGYKRQEALRPYLSSEEDRKKGKKFARYQLGDLLLHLEKKHGEDWGKVYDEAWERIDKKVEGLSKHIKLEEERRSEDAQSKAALTDWLRAKASFVIEGLKEADKDEFCRCELKLQKWYGDLRGKPFAIEAENSILDISGFSKQYNCAFIWQKDGVKKLNLYLIINYFKGGKLRFKKIKPEAFEANRFYTVINKKSGEIVPMEVNFNFDDPNLIILPLAFGKRQGREFIWNDLLSLETGSLKLANGRVIEKTLYNRRTRQDEPALFVALTFERREVLDSSNIKPMNLIGVDRGENIPAVIALTDPEGCPLSRFKDSLGNPTHILRIGESYKEKQRTIQAKKEVEQRRAGGYSRKYASKAKNLADDMVRNTARDLLYYAVTQDAMLIFENLSRGFGRQGKRTFMAERQYTRMEDWLTAKLAYEGLPSKTYLSKTLAQYTSKTCSNCGFTITSADYDRVLEKLKKTATGWMTTINGKELKVEGQITYYNRYKRQNVVKDLSVELDRLSEESVNNDISSWTKGRSGEALSLLKKRFSHRPVQEKFVCLNCGFETHADEQAALNIARSWLFLRSQEYKKYQTNKTTGNTDKRAFVETWQSFYRKKLKEVWKPAV

SEQ ID NO: 481 - protein, 978 aa, synthetic construct
  REGION 1..978: note = CasX variant
QEIKRINKIRRRLVKDSNTKKAGKTGPMKTLLVRVMTPDLRERLENLRKKPENIPQPISNTSRANLNKLLTDYTEMKKAILHVYREEFQKDPVGLMSRVAQPASKKIDQNKLKPEMDEKGNLTTAGFACSQCGQPLFVYKLEQVSEKGKAYTNYFGRCNVAEHEKLILLAQLKPEKDSDEAVTYSLGKFGQRALDFYSIHVTKESTHPVKPLAQIAGNRYASGPVGKALSDACMGTIASFLSKYQDIIIEHQKVVKGNQKRLESLRELAGKENLEYPSVTLPPQPHTKEGVDAYNEVIARVRMWVNLNLWQKLKLSRDDAKPLLRLKGFPSFPLVERQANEVDWWDMVCNVKKLINEKKEDGKVFWQNLAGYKRQEALRPYLSSEEDRKKGKKFARYQLGDLLLHLEKKHGEDWGKVYDEAWERIDKKVEGLSKHIKLEEERRSEDAQSKAALTDWLRAKASFVIEGLKEADKDEFCRCELKLQKWYGDLRGKPFAIEAENSILDISGFSKQYNCAFIWQKDGVKKLNLYLIINYFKGGKLRFKKIKPEAFEANRFYTVINKKSGEIVPMEVNFNFDDPNLIILPLAFGKRQGREFIWNDLLSLETGSLKLANGRVIEKTLYNRRTRQDEPALFVALTFERREVLDSSNIKPMNLIGVDRGENIPAVIALTDPEGCPLSRFKDSLGNPTHILRIGESYKEKQRTIQAKKEVEQRRAGGYSRKYASKAKNLADDMVRNTARDLLYYAVTQDAMLIFENLSRGFGRQGKRTFMAERQYTRMEDWLTAKLAYEGLPSKTYLSKTLAQYTSKTCSNCGFTITSADYDRVLEKLKKTATGWMTTINGKELKVEGQITYYNRYKRQNVVKDLSVELDRLSEESVNNDISSWTKGRSGEALSLLKKRFSHRPVQEKFVCLNCGFETHADEQAALNIARSWLFLRSQEYKKYQTNKTTGNTDKRAFVETWQSFYRKKLKEVWKPAV

SEQ ID NO: 482 - protein, 978 aa, synthetic construct; identical to SEQ ID NO: 96
  REGION 1..978: note = CasX variant

SEQ ID NO: 483 - protein, 978 aa, synthetic construct
  REGION 1..978: note = CasX variant
QEIKRINKIRRRLVKDSNTKKAGKTGPMKTLLVRVMTPDLRERLENLRKKPENIPQPISNTSRANLNKLLTDYTEMKKAILHVYWEEFQKDPVGLMSRVAQPASKKIDQNKLKPEMDEKGNLTTAGFACSQCGQPLFVYKLEQVSEKGKAYTNYFGRCNVAEHEKLILLYQLKPEKDSDEAVTYSLGKFGQRALDFYSIHVTKESTHPVKPLAQIAGNRYASGPVGKALSDACMGTIASFLSKYQDIIIEHQKVVKGNQKRLESLRELAGKENLEYPSVTLPPQPHTKEGVDAYNEVIARVRMWVNLNLWQKLKLSRDDAKPLLRLKGFPSFPLVERQANEVDWWDMVCNVKKLINEKKEDGKVFWQNLAGYKRQEALRPYLSSEEDRKKGKKFARYQLGDLLLHLEKKHGEDWGKVYDEAWERIDKKVEGLSKHIKLEEERRSEDAQSKAALTDWLRAKASFVIEGLKEADKDEFCRCELKLQKWYGDLRGKPFAIEAENSILDISGFSKQYNCAFIWQKDGVKKLNLYLIINYFKGGKLRFKKIKPEAFEANRFYTVINKKSGEIVPMEVNFNFDDPNLIILPLAFGKRQGREFIWNDLLSLETGSLKLANGRVIEKTLYNRRTRQDEPALFVALTFERREVLDSSNIKPMNLIGVDRGENIPAVIALTDPEGCPLSRFKDSLGNPTHILRIGESYKEKQRTIQAKKEVEQRRAGGYSRKYASKAKNLADDMVRNTARDLLYYAVTQDAMLIFENLSRGFGRQGKRTFMAERQYTRMEDWLTAKLAYEGLPSKTYLSKTLAQYTSKTCSNCGFTITSADYDRVLEKLKKTATGWMTTINGKELKVEGQITYYNRYKRQNVVKDLSVELDRLSEESVNNDISSWTKGRSGEALSLLKKRFSHRPVQEKFVCLNCGFETHADEQAALNIARSWLFLRSQEYKKYQTNKTTGNTDKRAFVETWQSFYRKKLKEVWKPAV

SEQ ID NO: 484 - protein, 978 aa, synthetic construct
  REGION 1..978: note = CasX variant
QEIKRINKIRRRLVKDSNTKKAGKTGPMKTLLVRVMTPDLRERLENLRKKPENIPQPISNTSRANLNKLLTDYTEMKKAILHVYWEEFQKDPVGLMSRVAQPASKKIDQNKLKPEMDEKGNLTTAGFACSQCGQPLFVYKLEQVSEKGKAYTNYFGRCNVAEHEKLILLSQLKPEKDSDEAVTYSLGKFGQRALDFYSIHVTKESTHPVKPLAQIAGNRYASGPVGKALSDACMGTIASFLSKYQDIIIEHQKVVKGNQKRLESLRELAGKENLEYPSVTLPPQPHTKEGVDAYNEVIARVRMWVNLNLWQKLKLSRDDAKPLLRLKGFPSFPLVERQANEVDWWDMVCNVKKLINEKKEDGKVFWQNLAGYKRQEALRPYLSSEEDRKKGKKFARYQLGDLLLHLEKKHGEDWGKVYDEAWERIDKKVEGLSKHIKLEEERRSEDAQSKAALTDWLRAKASFVIEGLKEADKDEFCRCELKLQKWYGDLRGKPFAIEAENSILDISGFSKQYNCAFIWQKDGVKKLNLYLIINYFKGGKLRFKKIKPEAFEANRFYTVINKKSGEIVPMEVNFNFDDPNLIILPLAFGKRQGREFIWNDLLSLETGSLKLANGRVIEKTLYNRRTRQDEPALFVALTFERREVLDSSNIKPMNLIGVDRGENIPAVIALTDPEGCPLSRFKDSLGNPTHILRIGESYKEKQRTIQAKKEVEQRRAGGYSRKYASKAKNLADDMVRNTARDLLYYAVTQDAMLIFENLSRGFGRQGKRTFMAERQYTRMEDWLTAKLAYEGLPSKTYLSKTLAQYTSKTCSNCGFTITSADYDRVLEKLKKTATGWMTTINGKELKVEGQITYYNRYKRQNVVKDLSVELDRLSEESVNNDISSWTKGRSGEALSLLKKRFSHRPVQEKFVCLNCGFETHADEQAALNIARSWLFLRSQEYKKYQTNKTTGNTDKRAFVETWQSFYRKKLKEVWKPAV

SEQ ID NO: 485 - protein, 978 aa, synthetic construct
  REGION 1..978: note = CasX variant
QEIKRINKIRRRLVKDSNTKKAGKTGPMKTLLVRVMTPDLRERLENLRKKPENIPQPISNTSRANLNKLLTDYTEMKKAILHVYWEEFQKDPVGLMSRVAQPASKKIDQNKLKPEMDEKGNLTTAGFACSQCGQPLFVYKLEQVSEKGKAYTNYFGRCNVAEHEKLILLAQLKPPKDSDEAVTYSLGKFGQRALDFYSIHVTKESTHPVKPLAQIAGNRYASGPVGKALSDACMGTIASFLSKYQDIIIEHQKVVKGNQKRLESLRELAGKENLEYPSVTLPPQPHTKEGVDAYNEVIARVRMWVNLNLWQKLKLSRDDAKPLLRLKGFPSFPLVERQANEVDWWDMVCNVKKLINEKKEDGKVFWQNLAGYKRQEALRPYLSSEEDRKKGKKFARYQLGDLLLHLEKKHGEDWGKVYDEAWERIDKKVEGLSKHIKLEEERRSEDAQSKAALTDWLRAKASFVIEGLKEADKDEFCRCELKLQKWYGDLRGKPFAIEAENSILDISGFSKQYNCAFIWQKDGVKKLNLYLIINYFKGGKLRFKKIKPEAFEANRFYTVINKKSGEIVPMEVNFNFDDPNLIILPLAFGKRQGREFIWNDLLSLETGSLKLANGRVIEKTLYNRRTRQDEPALFVALTFERREVLDSSNIKPMNLIGVDRGENIPAVIALTDPEGCPLSRFKDSLGNPTHILRIGESYKEKQRTIQAKKEVEQRRAGGYSRKYASKAKNLADDMVRNTARDLLYYAVTQDAMLIFENLSRGFGRQGKRTFMAERQYTRMEDWLTAKLAYEGLPSKTYLSKTLAQYTSKTCSNCGFTITSADYDRVLEKLKKTATGWMTTINGKELKVEGQITYYNRYKRQNVVKDLSVELDRLSEESVNNDISSWTKGRSGEALSLLKKRFSHRPVQEKFVCLNCGFETHADEQAALNIARSWLFLRSQEYKKYQTNKTTGNTDKRAFVETWQSFYRKKLKEVWKPAV

SEQ ID NO: 486 - protein, 977 aa, synthetic construct
  REGION 1..977: note = CasX variant
QEIKRINKIRRRLVKDSNTKKAGKTGPMKTLLVRVMTPDLRERLENLRKKPENIPQPISNTSRANLNKLLTDYTEMKKAILHVYWEEFQKDPVGLMSRVAQPASKKIDQNKLKPEMDEKGNLTTAGFACSQCGQPLFVYKLEQVSEKGKAYTNYFGRCNVAEHEKLILLAQLKPEKDSDEAVTYSLGKFGQRALDFYSIHVTKESTHPVKPLAQIAGNRYASPVGKALSDACMGTIASFLSKYQDIIIEHQKVVKGNQKRLESLRELAGKENLEYPSVTLPPQPHTKEGVDAYNEVIARVRMWVNLNLWQKLKLSRDDAKPLLRLKGFPSFPLVERQANEVDWWDMVCNVKKLINEKKEDGKVFWQNLAGYKRQEALRPYLSSEEDRKKGKKFARYQLGDLLLHLEKKHGEDWGKVYDEAWERIDKKVEGLSKHIKLEEERRSEDAQSKAALTDWLRAKASFVIEGLKEADKDEFCRCELKLQKWYGDLRGKPFAIEAENSILDISGFSKQYNCAFIWQKDGVKKLNLYLIINYFKGGKLRFKKIKPEAFEANRFYTVINKKSGEIVPMEVNFNFDDPNLIILPLAFGKRQGREFIWNDLLSLETGSLKLANGRVIEKTLYNRRTRQDEPALFVALTFERREVLDSSNIKPMNLIGVDRGENIPAVIALTDPEGCPLSRFKDSLGNPTHILRIGESYKEKQRTIQAKKEVEQRRAGGYSRKYASKAKNLADDMVRNTARDLLYYAVTQDAMLIFENLSRGFGRQGKRTFMAERQYTRMEDWLTAKLAYEGLPSKTYLSKTLAQYTSKTCSNCGFTITSADYDRVLEKLKKTATGWMTTINGKELKVEGQITYYNRYKRQNVVKDLSVELDRLSEESVNNDISSWTKGRSGEALSLLKKRFSHRPVQEKFVCLNCGFETHADEQAALNIARSWLFLRSQEYKKYQTNKTTGNTDKRAFVETWQSFYRKKLKEVWKPAV

SEQ ID NO: 487 - protein, 978 aa, synthetic construct; identical to SEQ ID NO: 93
  REGION 1..978: note = CasX variant

SEQ ID NO: 488 - protein, 978 aa, synthetic construct
  REGION 1..978: note = CasX variant
QEIKRINKIRRRLVKDSNTKKAGKTGPMKTLLVRVMTPDLRERLENLRKKPENIPQPISNTSRANLNKLLTDYTEMKKAILHVYWEEFQKDPVGLMSRVAQPASKKIDQNKLKPEMDEKGNLTTAGFACSQCGQPLFVYKLEQVSEKGKAYTNYFGRCNVAEHEKLILLAQLKPEKDSDEAVTYSLGKFGQRALDFYSIHVTKESTHPVKPLAQIAGNRYASGPVGKALSDACMGTIASFLSKYQDIIIEHQKVVKGNQKRLESLRELAGKENLEYPSVTLPPQPHTGEGVDAYNEVIARVRMWVNLNLWQKLKLSRDDAKPLLRLKGFPSFPLVERQANEVDWWDMVCNVKKLINEKKEDGKVFWQNLAGYKRQEALRPYLSSEEDRKKGKKFARYQLGDLLLHLEKKHGEDWGKVYDEAWERIDKKVEGLSKHIKLEEERRSEDAQSKAALTDWLRAKASFVIEGLKEADKDEFCRCELKLQKWYGDLRGKPFAIEAENSILDISGFSKQYNCAFIWQKDGVKKLNLYLIINYFKGGKLRFKKIKPEAFEANRFYTVINKKSGEIVPMEVNFNFDDPNLIILPLAFGKRQGREFIWNDLLSLETGSLKLANGRVIEKTLYNRRTRQDEPALFVALTFERREVLDSSNIKPMNLIGVDRGENIPAVIALTDPEGCPLSRFKDSLGNPTHILRIGESYKEKQRTIQAKKEVEQRRAGGYSRKYASKAKNLADDMVRNTARDLLYYAVTQDAMLIFENLSRGFGRQGKRTFMAERQYTRMEDWLTAKLAYEGLPSKTYLSKTLAQYTSKTCSNCGFTITSADYDRVLEKLKKTATGWMTTINGKELKVEGQITYYNRYKRQNVVKDLSVELDRLSEESVNNDISSWTKGRSGEALSLLKKRFSHRPVQEKFVCLNCGFETHADEQAALNIARSWLFLRSQEYKKYQTNKTTGNTDKRAFVETWQSFYRKKLKEVWKPAV

SEQ ID NO: 489 - protein, 978 aa, synthetic construct
  REGION 1..978: note = CasX variant
QEIKRINKIRRRLVKDSNTKKAGKTGPMKTLLVRVMTPDLRERLENLRKKPENIPQPISNTSRANLNKLLTDYTEMKKAILHVYWEEFQKDPVGLMSRVAQPASKKIDQNKLKPEMDEKGNLTTAGFACSQCGQPLFVYKLEQVSEKGKAYTNYFGRCNVAEHEKLILLAQLKPEKDSDEAVTYSLGKFGQRALDFYSIHVTKESTHPVKPLAQIAGNRYASGPVGKALSDACMGTIASFLSKYQDIIIEHQKVVKGNQKRLESLRELAGKENLEYPSVTLPPQPHTSEGVDAYNEVIARVRMWVNLNLWQKLKLSRDDAKPLLRLKGFPSFPLVERQANEVDWWDMVCNVKKLINEKKEDGKVFWQNLAGYKRQEALRPYLSSEEDRKKGKKFARYQLGDLLLHLEKKHGEDWGKVYDEAWERIDKKVEGLSKHIKLEEERRSEDAQSKAALTDWLRAKASFVIEGLKEADKDEFCRCELKLQKWYGDLRGKPFAIEAENSILDISGFSKQYNCAFIWQKDGVKKLNLYLIINYFKGGKLRFKKIKPEAFEANRFYTVINKKSGEIVPMEVNFNFDDPNLIILPLAFGKRQGREFIWNDLLSLETGSLKLANGRVIEKTLYNRRTRQDEPALFVALTFERREVLDSSNIKPMNLIGVDRGENIPAVIALTDPEGCPLSRFKDSLGNPTHILRIGESYKEKQRTIQAKKEVEQRRAGGYSRKYASKAKNLADDMVRNTARDLLYYAVTQDAMLIFENLSRGFGRQGKRTFMAERQYTRMEDWLTAKLAYEGLPSKTYLSKTLAQYTSKTCSNCGFTITSADYDRVLEKLKKTATGWMTTINGKELKVEGQITYYNRYKRQNVVKDLSVELDRLSEESVNNDISSWTKGRSGEALSLLKKRFSHRPVQEKFVCLNCGFETHADEQAALNIARSWLFLRSQEYKKYQTNKTTGNTDKRAFVETWQSFYRKKLKEVWKPAV

SEQ ID NO: 490 - protein, 978 aa, synthetic construct
  REGION 1..978: note = CasX variant
QEIKRINKIRRRLVKDSNTKKAGKTGPMKTLLVRVMTPDLRERLENLRKKPENIPQPISNTSRANLNKLLTDYTEMKKAILHVYWEEFQKDPVGLMSRVAQPASKKIDQNKLKPEMDEKGNLTTAGFACSQCGQPLFVYKLEQVSEKGKAYTNYFGRCNVAEHEKLILLAQLKPEKDSDEAVTYSLGKFGQRALDFYSIHVTKESTHPVKPLAQIAGNRYASGPVGKALSDACMGTIASFLSKYQDIIIEHQKVVKGNQKRLESLRELAGKENLEYPSVTLPPQPHTKEGLDAYNEVIARVRMWVNLNLWQKLKLSRDDAKPLLRLKGFPSFPLVERQANEVDWWDMVCNVKKLINEKKEDGKVFWQNLAGYKRQEALRPYLSSEEDRKKGKKFARYQLGDLLLHLEKKHGEDWGKVYDEAWERIDKKVEGLSKHIKLEEERRSEDAQSKAALTDWLRAKASFVIEGLKEADKDEFCRCELKLQKWYGDLRGKPFAIEAENSILDISGFSKQYNCAFIWQKDGVKKLNLYLIINYFKGGKLRFKKIKPEAFEANRFYTVINKKSGEIVPMEVNFNFDDPNLIILPLAFGKRQGREFIWNDLLSLETGSLKLANGRVIEKTLYNRRTRQDEPALFVALTFERREVLDSSNIKPMNLIGVDRGENIPAVIALTDPEGCPLSRFKDSLGNPTHILRIGESYKEKQRTIQAKKEVEQRRAGGYSRKYASKAKNLADDMVRNTARDLLYYAVTQDAMLIFENLSRGFGRQGKRTFMAERQYTRMEDWLTAKLAYEGLPSKTYLSKTLAQYTSKTCSNCGFTITSADYDRVLEKLKKTATGWMTTINGKELKVEGQITYYNRYKRQNVVKDLSVELDRLSEESVNNDISSWTKGRSGEALSLLKKRFSHRPVQEKFVCLNCGFETHADEQAALNIARSWLFLRSQEYKKYQTNKTTGNTDKRAFVETWQSFYRKKLKEVWKPAV

SEQ ID NO: 491 - protein, 978 aa, synthetic construct
  REGION 1..978: note = CasX variant
QEIKRINKIRRRLVKDSNTKKAGKTGPMKTLLVRVMTPDLRERLENLRKKPENIPQPISNTSRANLNKLLTDYTEMKKAILHVYWEEFQKDPVGLMSRVAQPASKKIDQNKLKPEMDEKGNLTTAGFACSQCGQPLFVYKLEQVSEKGKAYTNYFGRCNVAEHEKLILLAQLKPEKDSDEAVTYSLGKFGQRALDFYSIHVTKESTHPVKPLAQIAGNRYASGPVGKALSDACMGTIASFLSKYQDIIIEHQKVVKGNQKRLESLRELAGKENLEYPSVTLPPQPHTKEGVDAYNEVIARVRTWVNLNLWQKLKLSRDDAKPLLRLKGFPSFPLVERQANEVDWWDMVCNVKKLINEKKEDGKVFWQNLAGYKRQEALRPYLSSEEDRKKGKKFARYQLGDLLLHLEKKHGEDWGKVYDEAWERIDKKVEGLSKHIKLEEERRSEDAQSKAALTDWLRAKASFVIEGLKEADKDEFCRCELKLQKWYGDLRGKPFAIEAENSILDISGFSKQYNCAFIWQKDGVKKLNLYLIINYFKGGKLRFKKIKPEAFEANRFYTVINKKSGEIVPMEVNFNFDDPNLIILPLAFGKRQGREFIWNDLLSLETGSLKLANGRVIEKTLYNRRTRQDEPALFVALTFERREVLDSSNIKPMNLIGVDRGENIPAVIALTDPEGCPLSRFKDSLGNPTHILRIGESYKEKQRTIQAKKEVEQRRAGGYSRKYASKAKNLADDMVRNTARDLLYYAVTQDAMLIFENLSRGFGRQGKRTFMAERQYTRMEDWLTAKLAYEGLPSKTYLSKTLAQYTSKTCSNCGFTITSADYDRVLEKLKKTATGWMTTINGKELKVEGQITYYNRYKRQNVVKDLSVELDRLSEESVNNDISSWTKGRSGEALSLLKKRFSHRPVQEKFVCLNCGFETHADEQAALNIARSWLFLRSQEYKKYQTNKTTGNTDKRAFVETWQSFYRKKLKEVWKPAV

SEQ ID NO: 492 - protein, 978 aa, synthetic construct
  REGION 1..978: note = CasX variant
QEIKRINKIRRRLVKDSNTKKAGKTGPMKTLLVRVMTPDLRERLENLRKKPENIPQPISNTSRANLNKLLTDYTEMKKAILHVYWEEFQKDPVGLMSRVAQPASKKIDQNKLKPEMDEKGNLTTAGFACSQCGQPLFVYKLEQVSEKGKAYTNYFGRCNVAEHEKLILLAQLKPEKDSDEAVTYSLGKFGQRALDFYSIHVTKESTHPVKPLAQIAGNRYASGPVGKALSDACMGTIASFLSKYQDIIIEHQKVVKGNQKRLESLRELAGKENLEYPSVTLPPQPHTKEGVDAYNEVIARVRWWVNLNLWQKLKLSRDDAKPLLRLKGFPSFPLVERQANEVDWWDMVCNVKKLINEKKEDGKVFWQNLAGYKRQEALRPYLSSEEDRKKGKKFARYQLGDLLLHLEKKHGEDWGKVYDEAWERIDKKVEGLSKHIKLEEERRSEDAQSKAALTDWLRAKASFVIEGLKEADKDEFCRCELKLQKWYGDLRGKPFAIEAENSILDISGFSKQYNCAFIWQKDGVKKLNLYLIINYFKGGKLRFKKIKPEAFEANRFYTVINKKSGEIVPMEVNFNFDDPNLIILPLAFGKRQGREFIWNDLLSLETGSLKLANGRVIEKTLYNRRTRQDEPALFVALTFERREVLDSSNIKPMNLIGVDRGENIPAVIALTDPEGCPLSRFKDSLGNPTHILRIGESYKEKQRTIQAKKEVEQRRAGGYSRKYASKAKNLADDMVRNTARDLLYYAVTQDAMLIFENLSRGFGRQGKRTFMAERQYTRMEDWLTAKLAYEGLPSKTYLSKTLAQYTSKTCSNCGFTITSADYDRVLEKLKKTATGWMTTINGKELKVEGQITYYNRYKRQNVVKDLSVELDRLSEESVNNDISSWTKGRSGEALSLLKKRFSHRPVQEKFVCLNCGFETHADEQAALNIARSWLFLRSQEYKKYQTNKTTGNTDKRAFVETWQSFYRKKLKEVWKPAV

SEQ ID NO: 493 - protein, 978 aa, synthetic construct
  REGION 1..978: note = CasX variant
QEIKRINKIRRRLVKDSNTKKAGKTGPMKTLLVRVMTPDLRERLENLRKKPENIPQPISNTSRANLNKLLTDYTEMKKAILHVYWEEFQKDPVGLMSRVAQPASKKIDQNKLKPEMDEKGNLTTAGFACSQCGQPLFVYKLEQVSEKGKAYTNYFGRCNVAEHEKLILLAQLKPEKDSDEAVTYSLGKFGQRALDFYSIHVTKESTHPVKPLAQIAGNRYASGPVGKALSDACMGTIASFLSKYQDIIIEHQKVVKGNQKRLESLRELAGKENLEYPSVTLPPQPHTKEGVDAYNEVIARVRMWVNLNLWQKLKLSRDDAKPLLRLKNFPSFPLVERQANEVDWWDMVCNVKKLINEKKEDGKVFWQNLAGYKRQEALRPYLSSEEDRKKGKKFARYQLGDLLLHLEKKHGEDWGKVYDEAWERIDKKVEGLSKHIKLEEERRSEDAQSKAALTDWLRAKASFVIEGLKEADKDEFCRCELKLQKWYGDLRGKPFAIEAENSILDISGFSKQYNCAFIWQKDGVKKLNLYLIINYFKGGKLRFKKIKPEAFEANRFYTVINKKSGEIVPMEVNFNFDDPNLIILPLAFGKRQGREFIWNDLLSLETGSLKLANGRVIEKTLYNRRTRQDEPALFVALTFERREVLDSSNIKPMNLIGVDRGENIPAVIALTDPEGCPLSRFKDSLGNPTHILRIGESYKEKQRTIQAKKEVEQRRAGGYSRKYASKAKNLADDMVRNTARDLLYYAVTQDAMLIFENLSRGFGRQGKRTFMAERQYTRMEDWLTAKLAYEGLPSKTYLSKTLAQYTSKTCSNCGFTITSADYDRVLEKLKKTATGWMTTINGKELKVEGQITYYNRYKRQNVVKDLSVELDRLSEESVNNDISSWTKGRSGEALSLLKKRFSHRPVQEKFVCLNCGFETHADEQAALNIARSWLFLRSQEYKKYQTNKTTGNTDKRAFVETWQSFYRKKLKEVWKPAV

SEQ ID NO: 494 - protein, 978 aa, synthetic construct
  REGION 1..978: note = CasX variant
QEIKRINKIRRRLVKDSNTKKAGKTGPMKTLLVRVMTPDLRERLENLRKKPENIPQPISNTSRANLNKLLTDYTEMKKAILHVYWEEFQKDPVGLMSRVAQPASKKIDQNKLKPEMDEKGNLTTAGFACSQCGQPLFVYKLEQVSEKGKAYTNYFGRCNVAEHEKLILLAQLKPEKDSDEAVTYSLGKFGQRALDFYSIHVTKESTHPVKPLAQIAGNRYASGPVGKALSDACMGTIASFLSKYQDIIIEHQKVVKGNQKRLESLRELAGKENLEYPSVTLPPQPHTKEGVDAYNEVIARVRMWVNLNLWQKLKLSRDDAKPLLRLKGFPQFPLVERQANEVDWWDMVCNVKKLINEKKEDGKVFWQNLAGYKRQEALRPYLSSEEDRKKGKKFARYQLGDLLLHLEKKHGEDWGKVYDEAWERIDKKVEGLSKHIKLEEERRSEDAQSKAALTDWLRAKASFVIEGLKEADKDEFCRCELKLQKWYGDLRGKPFAIEAENSILDISGFSKQYNCAFIWQKDGVKKLNLYLIINYFKGGKLRFKKIKPEAFEANRFYTVINKKSGEIVPMEVNFNFDDPNLIILPLAFGKRQGREFIWNDLLSLETGSLKLANGRVIEKTLYNRRTRQDEPALFVALTFERREVLDSSNIKPMNLIGVDRGENIPAVIALTDPEGCPLSRFKDSLGNPTHILRIGESYKEKQRTIQAKKEVEQRRAGGYSRKYASKAKNLADDMVRNTARDLLYYAVTQDAMLIFENLSRGFGRQGKRTFMAERQYTRMEDWLTAKLAYEGLPSKTYLSKTLAQYTSKTCSNCGFTITSADYDRVLEKLKKTATGWMTTINGKELKVEGQITYYNRYKRQNVVKDLSVELDRLSEESVNNDISSWTKGRSGEALSLLKKRFSHRPVQEKFVCLNCGFETHADEQAALNIARSWLFLRSQEYKKYQTNKTTGNTDKRAFVETWQSFYRKKLKEVWKPAV

SEQ ID NO: 495 - protein, 979 aa, synthetic construct
  REGION 1..979: note = CasX variant
QEIKRINKIRRRLVKDSNTKKAGKTGPMKTLLVRVMTPDLRERLENLRKKPENIPQPISNTSRANLNKLLTDYTEMKKAILHVYWEEFQKDPVGLMSRVAQPASKKIDQNKLKPEMDEKGNLTTAGFACSQCGQPLFVYKLEQVSEKGKAYTNYFGRCNVAEHEKLILLAQLKPEKDSDEAVTYSLGKFGQRALDFYSIHVTKESTHPVKPLAQIAGNRYASGPVGKALSDACMGTIASFLSKYQDIIIEHQKVVKGNQKRLESLRELAGKENLEYPSVTLPPQPHTKEGVDAYNEVIARVRMWVNLNLWQKLKLSRDDAKPLLRLKGFPSFPALVERQANEVDWWDMVCNVKKLINEKKEDGKVFWQNLAGYKRQEALRPYLSSEEDRKKGKKFARYQLGDLLLHLEKKHGEDWGKVYDEAWERIDKKVEGLSKHIKLEEERRSEDAQSKAALTDWLRAKASFVIEGLKEADKDEFCRCELKLQKWYGDLRGKPFAIEAENSILDISGFSKQYNCAFIWQKDGVKKLNLYLIINYFKGGKLRFKKIKPEAFEANRFYTVINKKSGEIVPMEVNFNFDDPNLIILPLAFGKRQGREFIWNDLLSLETGSLKLANGRVIEKTLYNRRTRQDEPALFVALTFERREVLDSSNIKPMNLIGVDRGENIPAVIALTDPEGCPLSRFKDSLGNPTHILRIGESYKEKQRTIQAKKEVEQRRAGGYSRKYASKAKNLADDMVRNTARDLLYYAVTQDAMLIFENLSRGFGRQGKRTFMAERQYTRMEDWLTAKLAYEGLPSKTYLSKTLAQYTSKTCSNCGFTITSADYDRVLEKLKKTATGWMTTINGKELKVEGQITYYNRYKRQNVVKDLSVELDRLSEESVNNDISSWTKGRSGEALSLLKKRFSHRPVQEKFVCLNCGFETHADEQAALNIARSWLFLRSQEYKKYQTNKTTGNTDKRAFVETWQSFYRKKLKEVWKPAV

SEQ ID NO: 496 - protein, 977 aa, synthetic construct
  REGION 1..977: note = CasX variant
QEIKRINKIRRRLVKDSNTKKAGKTGPMKTLLVRVMTPDLRERLENLRKKPENIPQPISNTSRANLNKLLTDYTEMKKAILHVYWEEFQKDPVGLMSRVAQPASKKIDQNKLKPEMDEKGNLTTAGFACSQCGQPLFVYKLEQVSEKGKAYTNYFGRCNVAEHEKLILLAQLKPEKDSDEAVTYSLGKFGQRALDFYSIHVTKESTHPVKPLAQIAGNRYASGPVGKALSDACMGTIASFLSKYQDIIIEHQKVVKGNQKRLESLRELAGKENLEYPSVTLPPQPHTKEGVDAYNEVIARVRMWVNLNLWQKLKLSRDDAKPLLRLKGFPSFPLERQANEVDWWDMVCNVKKLINEKKEDGKVFWQNLAGYKRQEALRPYLSSEEDRKKGKKFARYQLGDLLLHLEKKHGEDWGKVYDEAWERIDKKVEGLSKHIKLEEERRSEDAQSKAALTDWLRAKASFVIEGLKEADKDEFCRCELKLQKWYGDLRGKPFAIEAENSILDISGFSKQYNCAFIWQKDGVKKLNLYLIINYFKGGKLRFKKIKPEAFEANRFYTVINKKSGEIVPMEVNFNFDDPNLIILPLAFGKRQGREFIWNDLLSLETGSLKLANGRVIEKTLYNRRTRQDEPALFVALTFERREVLDSSNIKPMNLIGVDRGENIPAVIALTDPEGCPLSRFKDSLGNPTHILRIGESYKEKQRTIQAKKEVEQRRAGGYSRKYASKAKNLADDMVRNTARDLLYYAVTQDAMLIFENLSRGFGRQGKRTFMAERQYTRMEDWLTAKLAYEGLPSKTYLSKTLAQYTSKTCSNCGFTITSADYDRVLEKLKKTATGWMTTINGKELKVEGQITYYNRYKRQNVVKDLSVELDRLSEESVNNDISSWTKGRSGEALSLLKKRFSHRPVQEKFVCLNCGFETHADEQAALNIARSWLFLRSQEYKKYQTNKTTGNTDKRAFVETWQSFYRKKLKEVWKPAV

SEQ ID NO: 497 - protein, 978 aa, synthetic construct
  REGION 1..978: note = CasX variant
QEIKRINKIRRRLVKDSNTKKAGKTGPMKTLLVRVMTPDLRERLENLRKKPENIPQPISNTSRANLNKLLTDYTEMKKAILHVYWEEFQKDPVGLMSRVAQPASKKIDQNKLKPEMDEKGNLTTAGFACSQCGQPLFVYKLEQVSEKGKAYTNYFGRCNVAEHEKLILLAQLKPEKDSDEAVTYSLGKFGQRALDFYSIHVTKESTHPVKPLAQIAGNRYASGPVGKALSDACMGTIASFLSKYQDIIIEHQKVVKGNQKRLESLRELAGKENLEYPSVTLPPQPHTKEGVDAYNEVIARVRMWVNLNLWQKLKLSRDDAKPLLRLKGFPSFPLVPRQANEVDWWDMVCNVKKLINEKKEDGKVFWQNLAGYKRQEALRPYLSSEEDRKKGKKFARYQLGDLLLHLEKKHGEDWGKVYDEAWERIDKKVEGLSKHIKLEEERRSEDAQSKAALTDWLRAKASFVIEGLKEADKDEFCRCELKLQKWYGDLRGKPFAIEAENSILDISGFSKQYNCAFIWQKDGVKKLNLYLIINYFKGGKLRFKKIKPEAFEANRFYTVINKKSGEIVPMEVNFNFDDPNLIILPLAFGKRQGREFIWNDLLSLETGSLKLANGRVIEKTLYNRRTRQDEPALFVALTFERREVLDSSNIKPMNLIGVDRGENIPAVIALTDPEGCPLSRFKDSLGNPTHILRIGESYKEKQRTIQAKKEVEQRRAGGYSRKYASKAKNLADDMVRNTARDLLYYAVTQDAMLIFENLSRGFGRQGKRTFMAERQYTRMEDWLTAKLAYEGLPSKTYLSKTLAQYTSKTCSNCGFTITSADYDRVLEKLKKTATGWMTTINGKELKVEGQITYYNRYKRQNVVKDLSVELDRLSEESVNNDISSWTKGRSGEALSLLKKRFSHRPVQEKFVCLNCGFETHADEQAALNIARSWLFLRSQEYKKYQTNKTTGNTDKRAFVETWQSFYRKKLKEVWKPAV

SEQ ID NO: 498 - protein, 977 aa, synthetic construct
  REGION 1..977: note = CasX variant
QEIKRINKIRRRLVKDSNTKKAGKTGPMKTLLVRVMTPDLRERLENLRKKPENIPQPISNTSRANLNKLLTDYTEMKKAILHVYWEEFQKDPVGLMSRVAQPASKKIDQNKLKPEMDEKGNLTTAGFACSQCGQPLFVYKLEQVSEKGKAYTNYFGRCNVAEHEKLILLAQLKPEKDSDEAVTYSLGKFGQRALDFYSIHVTKESTHPVKPLAQIAGNRYASGPVGKALSDACMGTIASFLSKYQDIIIEHQKVVKGNQKRLESLRELAGKENLEYPSVTLPPQPHTKEGVDAYNEVIARVRMWVNLNLWQKLKLSRDDAKPLLRLKGFPSFPLVRQANEVDWWDMVCNVKKLINEKKEDGKVFWQNLAGYKRQEALRPYLSSEEDRKKGKKFARYQLGDLLLHLEKKHGEDWGKVYDEAWERIDKKVEGLSKHIKLEEERRSEDAQSKAALTDWLRAKASFVIEGLKEADKDEFCRCELKLQKWYGDLRGKPFAIEAENSILDISGFSKQYNCAFIWQKDGVKKLNLYLIINYFKGGKLRFKKIKPEAFEANRFYTVINKKSGEIVPMEVNFNFDDPNLIILPLAFGKRQGREFIWNDLLSLETGSLKLANGRVIEKTLYNRRTRQDEPALFVALTFERREVLDSSNIKPMNLIGVDRGENIPAVIALTDPEGCPLSRFKDSLGNPTHILRIGESYKEKQRTIQAKKEVEQRRAGGYSRKYASKAKNLADDMVRNTARDLLYYAVTQDAMLIFENLSRGFGRQGKRTFMAERQYTRMEDWLTAKLAYEGLPSKTYLSKTLAQYTSKTCSNCGFTITSADYDRVLEKLKKTATGWMTTINGKELKVEGQITYYNRYKRQNVVKDLSVELDRLSEESVNNDISSWTKGRSGEALSLLKKRFSHRPVQEKFVCLNCGFETHADEQAALNIARSWLFLRSQEYKKYQTNKTTGNTDKRAFVETWQSFYRKKLKEVWKPAV

SEQ ID NO: 499 - protein, 978 aa, synthetic construct
  REGION 1..978: note = CasX variant
QEIKRINKIRRRLVKDSNTKKAGKTGPMKTLLVRVMTPDLRERLENLRKKPENIPQPISNTSRANLNKLLTDYTEMKKAILHVYWEEFQKDPVGLMSRVAQPASKKIDQNKLKPEMDEKGNLTTAGFACSQCGQPLFVYKLEQVSEKGKAYTNYFGRCNVAEHEKLILLAQLKPEKDSDEAVTYSLGKFGQRALDFYSIHVTKESTHPVKPLAQIAGNRYASGPVGKALSDACMGTIASFLSKYQDIIIEHQKVVKGNQKRLESLRELAGKENLEYPSVTLPPQPHTKEGVDAYNEVIARVRMWVNLNLWQKLKLSRDDAKPLLRLKGFPSFPLVLRQANEVDWWDMVCNVKKLINEKKEDGKVFWQNLAGYKRQEALRPYLSSEEDRKKGKKFARYQLGDLLLHLEKKHGEDWGKVYDEAWERIDKKVEGLSKHIKLEEERRSEDAQSKAALTDWLRAKASFVIEGLKEADKDEFCRCELKLQKWYGDLRGKPFAIEAENSILDISGFSKQYNCAFIWQKDGVKKLNLYLIINYFKGGKLRFKKIKPEAFEANRFYTVINKKSGEIVPMEVNFNFDDPNLIILPLAFGKRQGREFIWNDLLSLETGSLKLANGRVIEKTLYNRRTRQDEPALFVALTFERREVLDSSNIKPMNLIGVDRGENIPAVIALTDPEGCPLSRFKDSLGNPTHILRIGESYKEKQRTIQAKKEVEQRRAGGYSRKYASKAKNLADDMVRNTARDLLYYAVTQDAMLIFENLSRGFGRQGKRTFMAERQYTRMEDWLTAKLAYEGLPSKTYLSKTLAQYTSKTCSNCGFTITSADYDRVLEKLKKTATGWMTTINGKELKVEGQITYYNRYKRQNVVKDLSVELDRLSEESVNNDISSWTKGRSGEALSLLKKRFSHRPVQEKFVCLNCGFETHADEQAALNIARSWLFLRSQEYKKYQTNKTTGNTDKRAFVETWQSFYRKKLKEVWKPAV

SEQ ID NO: 500 - protein, 978 aa, synthetic construct
  REGION 1..978: note = CasX variant
QEIKRINKIRRRLVKDSNTKKAGKTGPMKTLLVRVMTPDLRERLENLRKKPENIPQPISNTSRANLNKLLTDYTEMKKAILHVYWEEFQKDPVGLMSRVAQPASKKIDQNKLKPEMDEKGNLTTAGFACSQCGQPLFVYKLEQVSEKGKAYTNYFGRCNVAEHEKLILLAQLKPEKDSDEAVTYSLGKFGQRALDFYSIHVTKESTHPVKPLAQIAGNRYASGPVGKALSDACMGTIASFLSKYQDIIIEHQKVVKGNQKRLESLRELAGKENLEYPSVTLPPQPHTKEGVDAYNEVIARVRMWVNLNLWQKLKLSRDDAKPLLRLKGFPSFPLVRRQANEVDWWDMVCNVKKLINEKKEDGKVFWQNLAGYKRQEALRPYLSSEEDRKKGKKFARYQLGDLLLHLEKKHGEDWGKVYDEAWERIDKKVEGLSKHIKLEEERRSEDAQSKAALTDWLRAKASFVIEGLKEADKDEFCRCELKLQKWYGDLRGKPFAIEAENSILDISGFSKQYNCAFIWQKDGVKKLNLYLIINYFKGGKLRFKKIKPEAFEANRFYTVINKKSGEIVPMEVNFNFDDPNLIILPLAFGKRQGREFIWNDLLSLETGSLKLANGRVIEKTLYNRRTRQDEPALFVALTFERREVLDSSNIKPMNLIGVDRGENIPAVIALTDPEGCPLSRFKDSLGNPTHILRIGESYKEKQRTIQAKKEVEQRRAGGYSRKYASKAKNLADDMVRNTARDLLYYAVTQDAMLIFENLSRGFGRQGKRTFMAERQYTRMEDWLTAKLAYEGLPSKTYLSKTLAQYTSKTCSNCGFTITSADYDRVLEKLKKTATGWMTTINGKELKVEGQITYYNRYKRQNVVKDLSVELDRLSEESVNNDISSWTKGRSGEALSLLKKRFSHRPVQEKFVCLNCGFETHADEQAALNIARSWLFLRSQEYKKYQTNKTTGNTDKRAFVETWQSFYRKKLKEVWKPAV

SEQ ID NO: 501 - protein, 979 aa, synthetic construct
  REGION 1..979: note = CasX variant
QEIKRINKIRRRLVKDSNTKKAGKTGPMKTLLVRVMTPDLRERLENLRKKPENIPQPISNTSRANLNKLLTDYTEMKKAILHVYWEEFQKDPVGLMSRVAQPASKKIDQNKLKPEMDEKGNLTTAGFACSQCGQPLFVYKLEQVSEKGKAYTNYFGRCNVAEHEKLILLAQLKPEKDSDEAVTYSLGKFGQRALDFYSIHVTKESTHPVKPLAQIAGNRYASGPVGKALSDACMGTIASFLSKYQDIIIEHQKVVKGNQKRLESLRELAGKENLEYPSVTLPPQPHTKEGVDAYNEVIARVRMWVNLNLWQKLKLSRDDAKPLLRLKGFPSFPLVERQQANEVDWWDMVCNVKKLINEKKEDGKVFWQNLAGYKRQEALRPYLSSEEDRKKGKKFARYQLGDLLLHLEKKHGEDWGKVYDEAWERIDKKVEGLSKHIKLEEERRSEDAQSKAALTDWLRAKASFVIEGLKEADKDEFCRCELKLQKWYGDLRGKPFAIEAENSILDISGFSKQYNCAFIWQKDGVKKLNLYLIINYFKGGKLRFKKIKPEAFEANRFYTVINKKSGEIVPMEVNFNFDDPNLIILPLAFGKRQGREFIWNDLLSLETGSLKLANGRVIEKTLYNRRTRQDEPALFVALTFERREVLDSSNIKPMNLIGVDRGENIPAVIALTDPEGCPLSRFKDSLGNPTHILRIGESYKEKQRTIQAKKEVEQRRAGGYSRKYASKAKNLADDMVRNTARDLLYYAVTQDAMLIFENLSRGFGRQGKRTFMAERQYTRMEDWLTAKLAYEGLPSKTYLSKTLAQYTSKTCSNCGFTITSADYDRVLEKLKKTATGWMTTINGKELKVEGQITYYNRYKRQNVVKDLSVELDRLSEESVNNDISSWTKGRSGEALSLLKKRFSHRPVQEKFVCLNCGFETHADEQAALNIARSWLFLRSQEYKKYQTNKTTGNTDKRAFVETWQSFYRKKLKEVWKPAV

SEQ ID NO: 502 - protein, 979 aa, synthetic construct
  REGION 1..979: note = CasX variant
QEIKRINKIRRRLVKDSNTKKAGKTGPMKTLLVRVMTPDLRERLENLRKKPENIPQPISNTSRANLNKLLTDYTEMKKAILHVYWEEFQKDPVGLMSRVAQPASKKIDQNKLKPEMDEKGNLTTAGFACSQCGQPLFVYKLEQVSEKGKAYTNYFGRCNVAEHEKLILLAQLKPEKDSDEAVTYSLGKFGQRALDFYSIHVTKESTHPVKPLAQIAGNRYASGPVGKALSDACMGTIASFLSKYQDIIIEHQKVVKGNQKRLESLRELAGKENLEYPSVTLPPQPHTKEGVDAYNEVIARVRMWVNLNLWQKLKLSRDDAKPLLRLKGFPSFPLVERQANHEVDWWDMVCNVKKLINEKKEDGKVFWQNLAGYKRQEALRPYLSSEEDRKKGKKFARYQLGDLLLHLEKKHGEDWGKVYDEAWERIDKKVEGLSKHIKLEEERRSEDAQSKAALTDWLRAKASFVIEGLKEADKDEFCRCELKLQKWYGDLRGKPFAIEAENSILDISGFSKQYNCAFIWQKDGVKKLNLYLIINYFKGGKLRFKKIKPEAFEANRFYTVINKKSGEIVPMEVNFNFDDPNLIILPLAFGKRQGREFIWNDLLSLETGSLKLANGRVIEKTLYNRRTRQDEPALFVALTFERREVLDSSNIKPMNLIGVDRGENIPAVIALTDPEGCPLSRFKDSLGNPTHILRIGESYKEKQRTIQAKKEVEQRRAGGYSRKYASKAKNLADDMVRNTARDLLYYAVTQDAMLIFENLSRGFGRQGKRTFMAERQYTRMEDWLTAKLAYEGLPSKTYLSKTLAQYTSKTCSNCGFTITSADYDRVLEKLKKTATGWMTTINGKELKVEGQITYYNRYKRQNVVKDLSVELDRLSEESVNNDISSWTKGRSGEALSLLKKRFSHRPVQEKFVCLNCGFETHADEQAALNIARSWLFLRSQEYKKYQTNKTTGNTDKRAFVETWQSFYRKKLKEVWKPAV

SEQ ID NO: 503 - protein, 979 aa, synthetic construct
  REGION 1..979: note = CasX variant
QEIKRINKIRRRLVKDSNTKKAGKTGPMKTLLVRVMTPDLRERLENLRKKPENIPQPISNTSRANLNKLLTDYTEMKKAILHVYWEEFQKDPVGLMSRVAQPASKKIDQNKLKPEMDEKGNLTTAGFACSQCGQPLFVYKLEQVSEKGKAYTNYFGRCNVAEHEKLILLAQLKPEKDSDEAVTYSLGKFGQRALDFYSIHVTKESTHPVKPLAQIAGNRYASGPVGKALSDACMGTIASFLSKYQDIIIEHQKVVKGNQKRLESLRELAGKENLEYPSVTLPPQPHTKEGVDAYNEVIARVRMWVNLNLWQKLKLSRDDAKPLLRLKGFPSFPLVERQANAEVDWWDMVCNVKKLINEKKEDGKVFWQNLAGYKRQEALRPYLSSEEDRKKGKKFARYQLGDLLLHLEKKHGEDWGKVYDEAWERIDKKVEGLSKHIKLEEERRSEDAQSKAALTDWLRAKASFVIEGLKEADKDEFCRCELKLQKWYGDLRGKPFAIEAENSILDISGFSKQYNCAFIWQKDGVKKLNLYLIINYFKGGKLRFKKIKPEAFEANRFYTVINKKSGEIVPMEVNFNFDDPNLIILPLAFGKRQGREFIWNDLLSLETGSLKLANGRVIEKTLYNRRTRQDEPALFVALTFERREVLDSSNIKPMNLIGVDRGENIPAVIALTDPEGCPLSRFKDSLGNPTHILRIGESYKEKQRTIQAKKEVEQRRAGGYSRKYASKAKNLADDMVRNTARDLLYYAVTQDAMLIFENLSRGFGRQGKRTFMAERQYTRMEDWLTAKLAYEGLPSKTYLSKTLAQYTSKTCSNCGFTITSADYDRVLEKLKKTATGWMTTINGKELKVEGQITYYNRYKRQNVVKDLSVELDRLSEESVNNDISSWTKGRSGEALSLLKKRFSHRPVQEKFVCLNCGFETHADEQAALNIARSWLFLRSQEYKKYQTNKTTGNTDKRAFVETWQSFYRKKLKEVWKPAV

SEQ ID NO: 504 - protein, 979 aa, synthetic construct
  REGION 1..979: note = CasX variant
QEIKRINKIRRRLVKDSNTKKAGKTGPMKTLLVRVMTPDLRERLENLRKKPENIPQPISNTSRANLNKLLTDYTEMKKAILHVYWEEFQKDPVGLMSRVAQPASKKIDQNKLKPEMDEKGNLTTAGFACSQCGQPLFVYKLEQVSEKGKAYTNYFGRCNVAEHEKLILLAQLKPEKDSDEAVTYSLGKFGQRALDFYSIHVTKESTHPVKPLAQIAGNRYASGPVGKALSDACMGTIASFLSKYQDIIIEHQKVVKGNQKRLESLRELAGKENLEYPSVTLPPQPHTKEGVDAYNEVIARVRMWVNLNLWQKLKLSRDDAKPLLRLKGFPSFPLVERQANEVDDWWDMVCNVKKLINEKKEDGKVFWQNLAGYKRQEALRPYLSSEEDRKKGKKFARYQLGDLLLHLEKKHGEDWGKVYDEAWERIDKKVEGLSKHIKLEEERRSEDAQSKAALTDWLRAKASFVIEGLKEADKDEFCRCELKLQKWYGDLRGKPFAIEAENSILDISGFSKQYNCAFIWQKDGVKKLNLYLIINYFKGGKLRFKKIKPEAFEANRFYTVINKKSGEIVPMEVNFNFDDPNLIILPLAFGKRQGREFIWNDLLSLETGSLKLANGRVIEKTLYNRRTRQDEPALFVALTFERREVLDSSNIKPMNLIGVDRGENIPAVIALTDPEGCPLSRFKDSLGNPTHILRIGESYKEKQRTIQAKKEVEQRRAGGYSRKYASKAKNLADDMVRNTARDLLYYAVTQDAMLIFENLSRGFGRQGKRTFMAERQYTRMEDWLTAKLAYEGLPSKTYLSKTLAQYTSKTCSNCGFTITSADYDRVLEKLKKTATGWMTTINGKELKVEGQITYYNRYKRQNVVKDLSVELDRLSEESVNNDISSWTKGRSGEALSLLKKRFSHRPVQEKFVCLNCGFETHADEQAALNIARSWLFLRSQEYKKYQTNKTTGNTDKRAFVETWQSFYRKKLKEVWKPAV

SEQ ID NO: 505 - protein, 979 aa, synthetic construct
  REGION 1..979: note = CasX variant
QEIKRINKIRRRLVKDSNTKKAGKTGPMKTLLVRVMTPDLRERLENLRKKPENIPQPISNTSRANLNKLLTDYTEMKKAILHVYWEEFQKDPVGLMSRVAQPASKKIDQNKLKPEMDEKGNLTTAGFACSQCGQPLFVYKLEQVSEKGKAYTNYFGRCNVAEHEKLILLAQLKPEKDSDEAVTYSLGKFGQRALDFYSIHVTKESTHPVKPLAQIAGNRYASGPVGKALSDACMGTIASFLSKYQDIIIEHQKVVKGNQKRLESLRELAGKENLEYPSVTLPPQPHTKEGVDAYNEVIARVRMWVNLNLWQKLKLSRDDAKPLLRLKGFPSFPLVERQANEVDWWPDMVCNVKKLINEKKEDGKVFWQNLAGYKRQEALRPYLSSEEDRKKGKKFARYQLGDLLLHLEKKHGEDWGKVYDEAWERIDKKVEGLSKHIKLEEERRSEDAQSKAALTDWLRAKASFVIEGLKEADKDEFCRCELKLQKWYGDLRGKPFAIEAENSILDISGFSKQYNCAFIWQKDGVKKLNLYLIINYFKGGKLRFKKIKPEAFEANRFYTVINKKSGEIVPMEVNFNFDDPNLIILPLAFGKRQGREFIWNDLLSLETGSLKLANGRVIEKTLYNRRTRQDEPALFVALTFERREVLDSSNIKPMNLIGVDRGENIPAVIALTDPEGCPLSRFKDSLGNPTHILRIGESYKEKQRTIQAKKEVEQRRAGGYSRKYASKAKNLADDMVRNTARDLLYYAVTQDAMLIFENLSRGFGRQGKRTFMAERQYTRMEDWLTAKLAYEGLPSKTYLSKTLAQYTSKTCSNCGFTITSADYDRVLEKLKKTATGWMTTINGKELKVEGQITYYNRYKRQNVVKDLSVELDRLSEESVNNDISSWTKGRSGEALSLLKKRFSHRPVQEKFVCLNCGFETHADEQAALNIARSWLFLRSQEYKKYQTNKTTGNTDKRAFVETWQSFYRKKLKEVWKPAV

SEQ ID NO: 506 - protein, 978 aa, synthetic construct
  REGION 1..978: note = CasX variant
QEIKRINKIRRRLVKDSNTKKAGKTGPMKTLLVRVMTPDLRERLENLRKKPENIPQPISNTSRANLNKLLTDYTEMKKAILHVYWEEFQKDPVGLMSRVAQPASKKIDQNKLKPEMDEKGNLTTAGFACSQCGQPLFVYKLEQVSEKGKAYTNYFGRCNVAEHEKLILLAQLKPEKDSDEAVTYSLGKFGQRALDFYSIHVTKESTHPVKPLAQIAGNRYASGPVGKALSDACMGTIASFLSKYQDIIIEHQKVVKGNQKRLESLRELAGKENLEYPSVTLPPQPHTKEGVDAYNEVIARVRMWVNLNLWQKLKLSRDDAKPLLRLKGFPSFPLVERQANEVDWWDMVCNVKKLINEKKEDGKVFWQNLAGYKRQEALRPYLSSEEDRKKGKKFARTQLGDLLLHLEKKHGEDWGKVYDEAWERIDKKVEGLSKHIKLEEERRSEDAQSKAALTDWLRAKASFVIEGLKEADKDEFCRCELKLQKWYGDLRGKPFAIEAENSILDISGFSKQYNCAFIWQKDGVKKLNLYLIINYFKGGKLRFKKIKPEAFEANRFYTVINKKSGEIVPMEVNFNFDDPNLIILPLAFGKRQGREFIWNDLLSLETGSLKLANGRVIEKTLYNRRTRQDEPALFVALTFERREVLDSSNIKPMNLIGVDRGENIPAVIALTDPEGCPLSRFKDSLGNPTHILRIGESYKEKQRTIQAKKEVEQRRAGGYSRKYASKAKNLADDMVRNTARDLLYYAVTQDAMLIFENLSRGFGRQGKRTFMAERQYTRMEDWLTAKLAYEGLPSKTYLSKTLAQYTSKTCSNCGFTITSADYDRVLEKLKKTATGWMTTINGKELKVEGQITYYNRYKRQNVVKDLSVELDRLSEESVNNDISSWTKGRSGEALSLLKKRFSHRPVQEKFVCLNCGFETHADEQAALNIARSWLFLRSQEYKKYQTNKTTGNTDKRAFVETWQSFYRKKLKEVWKPAV

SEQ ID NO: 507 - protein, 978 aa, synthetic construct
  REGION 1..978: note = CasX variant
QEIKRINKIRRRLVKDSNTKKAGKTGPMKTLLVRVMTPDLRERLENLRKKPENIPQPISNTSRANLNKLLTDYTEMKKAILHVYWEEFQKDPVGLMSRVAQPASKKIDQNKLKPEMDEKGNLTTAGFACSQCGQPLFVYKLEQVSEKGKAYTNYFGRCNVAEHEKLILLAQLKPEKDSDEAVTYSLGKFGQRALDFYSIHVTKESTHPVKPLAQIAGNRYASGPVGKALSDACMGTIASFLSKYQDIIIEHQKVVKGNQKRLESLRELAGKENLEYPSVTLPPQPHTKEGVDAYNEVIARVRMWVNLNLWQKLKLSRDDAKPLLRLKGFPSFPLVERQANEVDWWDMVCNVKKLINEKKEDGKVFWQNLAGYKRQEALRPYLSSEEDRKKGKKFARYQLMDLLLHLEKKHGEDWGKVYDEAWERIDKKVEGLSKHIKLEEERRSEDAQSKAALTDWLRAKASFVIEGLKEADKDEFCRCELKLQKWYGDLRGKPFAIEAENSILDISGFSKQYNCAFIWQKDGVKKLNLYLIINYFKGGKLRFKKIKPEAFEANRFYTVINKKSGEIVPMEVNFNFDDPNLIILPLAFGKRQGREFIWNDLLSLETGSLKLANGRVIEKTLYNRRTRQDEPALFVALTFERREVLDSSNIKPMNLIGVDRGENIPAVIALTDPEGCPLSRFKDSLGNPTHILRIGESYKEKQRTIQAKKEVEQRRAGGYSRKYASKAKNLADDMVRNTARDLLYYAVTQDAMLIFENLSRGFGRQGKRTFMAERQYTRMEDWLTAKLAYEGLPSKTYLSKTLAQYTSKTCSNCGFTITSADYDRVLEKLKKTATGWMTTINGKELKVEGQITYYNRYKRQNVVKDLSVELDRLSEESVNNDISSWTKGRSGEALSLLKKRFSHRPVQEKFVCLNCGFETHADEQAALNIARSWLFLRSQEYKKYQTNKTTGNTDKRAFVETWQSFYRKKLKEVWKPAV

SEQ ID NO: 508 - protein, 978 aa, synthetic construct
  REGION 1..978: note = CasX variant
QEIKRINKIRRRLVKDSNTKKAGKTGPMKTLLVRVMTPDLRERLENLRKKPENIPQPISNTSRANLNKLLTDYTEMKKAILHVYWEEFQKDPVGLMSRVAQPASKKIDQNKLKPEMDEKGNLTTAGFACSQCGQPLFVYKLEQVSEKGKAYTNYFGRCNVAEHEKLILLAQLKPEKDSDEAVTYSLGKFGQRALDFYSIHVTKESTHPVKPLAQIAGNRYASGPVGKALSDACMGTIASFLSKYQDIIIEHQKVVKGNQKRLESLRELAGKENLEYPSVTLPPQPHTKEGVDAYNEVIARVRMWVNLNLWQKLKLSRDDAKPLLRLKGFPSFPLVERQANEVDWWDMVCNVKKLINEKKEDGKVFWQNLAGYKRQEALRPYLSSEEDRKKGKKFARYQLGDLLNHLEKKHGEDWGKVYDEAWERIDKKVEGLSKHIKLEEERRSEDAQSKAALTDWLRAKASFVIEGLKEADKDEFCRCELKLQKWYGDLRGKPFAIEAENSILDISGFSKQYNCAFIWQKDGVKKLNLYLIINYFKGGKLRFKKIKPEAFEANRFYTVINKKSGEIVPMEVNFNFDDPNLIILPLAFGKRQGREFIWNDLLSLETGSLKLANGRVIEKTLYNRRTRQDEPALFVALTFERREVLDSSNIKPMNLIGVDRGENIPAVIALTDPEGCPLSRFKDSLGNPTHILRIGESYKEKQRTIQAKKEVEQRRAGGYSRKYASKAKNLADDMVRNTARDLLYYAVTQDAMLIFENLSRGFGRQGKRTFMAERQYTRMEDWLTAKLAYEGLPSKTYLSKTLAQYTSKTCSNCGFTITSADYDRVLEKLKKTATGWMTTINGKELKVEGQITYYNRYKRQNVVKDLSVELDRLSEESVNNDISSWTKGRSGEALSLLKKRFSHRPVQEKFVCLNCGFETHADEQAALNIARSWLFLRSQEYKKYQTNKTTGNTDKRAFVETWQSFYRKKLKEVWKPAV

SEQ ID NO: 509 - protein, 978 aa, synthetic construct
  REGION 1..978: note = CasX variant
QEIKRINKIRRRLVKDSNTKKAGKTGPMKTLLVRVMTPDLRERLENLRKKPENIPQPISNTSRANLNKLLTDYTEMKKAILHVYWEEFQKDPVGLMSRVAQPASKKIDQNKLKPEMDEKGNLTTAGFACSQCGQPLFVYKLEQVSEKGKAYTNYFGRCNVAEHEKLILLAQLKPEKDSDEAVTYSLGKFGQRALDFYSIHVTKESTHPVKPLAQIAGNRYASGPVGKALSDACMGTIASFLSKYQDIIIEHQKVVKGNQKRLESLRELAGKENLEYPSVTLPPQPHTKEGVDAYNEVIARVRMWVNLNLWQKLKLSRDDAKPLLRLKGFPSFPLVERQANEVDWWDMVCNVKKLINEKKEDGKVFWQNLAGYKRQEALRPYLSSEEDRKKGKKFARYQLGDLLWHLEKKHGEDWGKVYDEAWERIDKKVEGLSKHIKLEEERRSEDAQSKAALTDWLRAKASFVIEGLKEADKDEFCRCELKLQKWYGDLRGKPFAIEAENSILDISGFSKQYNCAFIWQKDGVKKLNLYLIINYFKGGKLRFKKIKPEAFEANRFYTVINKKSGEIVPMEVNFNFDDPNLIILPLAFGKRQGREFIWNDLLSLETGSLKLANGRVIEKTLYNRRTRQDEPALFVALTFERREVLDSSNIKPMNLIGVDRGENIPAVIALTDPEGCPLSRFKDSLGNPTHILRIGESYKEKQRTIQAKKEVEQRRAGGYSRKYASKAKNLADDMVRNTARDLLYYAVTQDAMLIFENLSRGFGRQGKRTFMAERQYTRMEDWLTAKLAYEGLPSKTYLSKTLAQYTSKTCSNCGFTITSADYDRVLEKLKKTATGWMTTINGKELKVEGQITYYNRYKRQNVVKDLSVELDRLSEESVNNDISSWTKGRSGEALSLLKKRFSHRPVQEKFVCLNCGFETHADEQAALNIARSWLFLRSQEYKKYQTNKTTGNTDKRAFVETWQSFYRKKLKEVWKPAV

SEQ ID NO: 510 - protein, 978 aa, synthetic construct
  REGION 1..978: note = CasX variant
QEIKRINKIRRRLVKDSNTKKAGKTGPMKTLLVRVMTPDLRERLENLRKKPENIPQPISNTSRANLNKLLTDYTEMKKAILHVYWEEFQKDPVGLMSRVAQPASKKIDQNKLKPEMDEKGNLTTAGFACSQCGQPLFVYKLEQVSEKGKAYTNYFGRCNVAEHEKLILLAQLKPEKDSDEAVTYSLGKFGQRALDFYSIHVTKESTHPVKPLAQIAGNRYASGPVGKALSDACMGTIASFLSKYQDIIIEHQKVVKGNQKRLESLRELAGKENLEYPSVTLPPQPHTKEGVDAYNEVIARVRMWVNLNLWQKLKLSRDDAKPLLRLKGFPSFPLVERQANEVDWWDMVCNVKKLINEKKEDGKVFWQNLAGYKRQEALRPYLSSEEDRKKGKKFARYQLGDLLLHLYKKHGEDWGKVYDEAWERIDKKVEGLSKHIKLEEERRSEDAQSKAALTDWLRAKASFVIEGLKEADKDEFCRCELKLQKWYGDLRGKPFAIEAENSILDISGFSKQYNCAFIWQKDGVKKLNLYLIINYFKGGKLRFKKIKPEAFEANRFYTVINKKSGEIVPMEVNFNFDDPNLIILPLAFGKRQGREFIWNDLLSLETGSLKLANGRVIEKTLYNRRTRQDEPALFVALTFERREVLDSSNIKPMNLIGVDRGENIPAVIALTDPEGCPLSRFKDSLGNPTHILRIGESYKEKQRTIQAKKEVEQRRAGGYSRKYASKAKNLADDMVRNTARDLLYYAVTQDAMLIFENLSRGFGRQGKRTFMAERQYTRMEDWLTAKLAYEGLPSKTYLSKTLAQYTSKTCSNCGFTITSADYDRVLEKLKKTATGWMTTINGKELKVEGQITYYNRYKRQNVVKDLSVELDRLSEESVNNDISSWTKGRSGEALSLLKKRFSHRPVQEKFVCLNCGFETHADEQAALNIARSWLFLRSQEYKKYQTNKTTGNTDKRAFVETWQSFYRKKLKEVWKPAV

SEQ ID NO: 511 - protein, 978 aa, synthetic construct
  REGION 1..978: note = CasX variant
QEIKRINKIRRRLVKDSNTKKAGKTGPMKTLLVRVMTPDLRERLENLRKKPENIPQPISNTSRANLNKLLTDYTEMKKAILHVYWEEFQKDPVGLMSRVAQPASKKIDQNKLKPEMDEKGNLTTAGFACSQCGQPLFVYKLEQVSEKGKAYTNYFGRCNVAEHEKLILLAQLKPEKDSDEAVTYSLGKFGQRALDFYSIHVTKESTHPVKPLAQIAGNRYASGPVGKALSDACMGTIASFLSKYQDIIIEHQKVVKGNQKRLESLRELAGKENLEYPSVTLPPQPHTKEGVDAYNEVIARVRMWVNLNLWQKLKLSRDDAKPLLRLKGFPSFPLVERQANEVDWWDMVCNVKKLINEKKEDGKVFWQNLAGYKRQEALRPYLSSEEDRKKGKKFARYQLGDLLLHLEKKHPEDWGKVYDEAWERIDKKVEGLSKHIKLEEERRSEDAQSKAALTDWLRAKASFVIEGLKEADKDEFCRCELKLQKWYGDLRGKPFAIEAENSILDISGFSKQYNCAFIWQKDGVKKLNLYLIINYFKGGKLRFKKIKPEAFEANRFYTVINKKSGEIVPMEVNFNFDDPNLIILPLAFGKRQGREFIWNDLLSLETGSLKLANGRVIEKTLYNRRTRQDEPALFVALTFERREVLDSSNIKPMNLIGVDRGENIPAVIALTDPEGCPLSRFKDSLGNPTHILRIGESYKEKQRTIQAKKEVEQRRAGGYSRKYASKAKNLADDMVRNTARDLLYYAVTQDAMLIFENLSRGFGRQGKRTFMAERQYTRMEDWLTAKLAYEGLPSKTYLSKTLAQYTSKTCSNCGFTITSADYDRVLEKLKKTATGWMTTINGKELKVEGQITYYNRYKRQNVVKDLSVELDRLSEESVNNDISSWTKGRSGEALSLLKKRFSHRPVQEKFVCLNCGFETHADEQAALNIARSWLFLRSQEYKKYQTNKTTGNTDKRAFVETWQSFYRKKLKEVWKPAV

SEQ ID NO: 512 - protein, 979 aa, synthetic construct
  REGION 1..979: note = CasX variant
QEIKRINKIRRRLVKDSNTKKAGKTGPMKTLLVRVMTPDLRERLENLRKKPENIPQPISNTSRANLNKLLTDYTEMKKAILHVYWEEFQKDPVGLMSRVAQPASKKIDQNKLKPEMDEKGNLTTAGFACSQCGQPLFVYKLEQVSEKGKAYTNYFGRCNVAEHEKLILLAQLKPEKDSDEAVTYSLGKFGQRALDFYSIHVTKESTHPVKPLAQIAGNRYASGPVGKALSDACMGTIASFLSKYQDIIIEHQKVVKGNQKRLESLRELAGKENLEYPSVTLPPQPHTKEGVDAYNEVIARVRMWVNLNLWQKLKLSRDDAKPLLRLKGFPSFPLVERQANEVDWWDMVCNVKKLINEKKEDGKVFWQNLAGYKRQEALRPYLSSEEDRKKGKKFARYQLGDLLLHLEKKHEGEDWGKVYDEAWERIDKKVEGLSKHIKLEEERRSEDAQSKAALTDWLRAKASFVIEGLKEADKDEFCRCELKLQKWYGDLRGKPFAIEAENSILDISGFSKQYNCAFIWQKDGVKKLNLYLIINYFKGGKLRFKKIKPEAFEANRFYTVINKKSGEIVPMEVNFNFDDPNLIILPLAFGKRQGREFIWNDLLSLETGSLKLANGRVIEKTLYNRRTRQDEPALFVALTFERREVLDSSNIKPMNLIGVDRGENIPAVIALTDPEGCPLSRFKDSLGNPTHILRIGESYKEKQRTIQAKKEVEQRRAGGYSRKYASKAKNLADDMVRNTARDLLYYAVTQDAMLIFENLSRGFGRQGKRTFMAERQYTRMEDWLTAKLAYEGLPSKTYLSKTLAQYTSKTCSNCGFTITSADYDRVLEKLKKTATGWMTTINGKELKVEGQITYYNRYKRQNVVKDLSVELDRLSEESVNNDISSWTKGRSGEALSLLKKRFSHRPVQEKFVCLNCGFETHADEQAALNIARSWLFLRSQEYKKYQTNKTTGNTDKRAFVETWQSFYRKKLKEVWKPAV

SEQ ID NO: 513 - protein, 979 aa, synthetic construct
  REGION 1..979: note = CasX variant
QEIKRINKIRRRLVKDSNTKKAGKTGPMKTLLVRVMTPDLRERLENLRKKPENIPQPISNTSRANLNKLLTDYTEMKKAILHVYWEEFQKDPVGLMSRVAQPASKKIDQNKLKPEMDEKGNLTTAGFACSQCGQPLFVYKLEQVSEKGKAYTNYFGRCNVAEHEKLILLAQLKPEKDSDEAVTYSLGKFGQRALDFYSIHVTKESTHPVKPLAQIAGNRYASGPVGKALSDACMGTIASFLSKYQDIIIEHQKVVKGNQKRLESLRELAGKENLEYPSVTLPPQPHTKEGVDAYNEVIARVRMWVNLNLWQKLKLSRDDAKPLLRLKGFPSFPLVERQANEVDWWDMVCNVKKLINEKKEDGKVFWQNLAGYKRQEALRPYLSSEEDRKKGKKFARYQLGDLLLHLEKKHGERDWGKVYDEAWERIDKKVEGLSKHIKLEEERRSEDAQSKAALTDWLRAKASFVIEGLKEADKDEFCRCELKLQKWYGDLRGKPFAIEAENSILDISGFSKQYNCAFIWQKDGVKKLNLYLIINYFKGGKLRFKKIKPEAFEANRFYTVINKKSGEIVPMEVNFNFDDPNLIILPLAFGKRQGREFIWNDLLSLETGSLKLANGRVIEKTLYNRRTRQDEPALFVALTFERREVLDSSNIKPMNLIGVDRGENIPAVIALTDPEGCPLSRFKDSLGNPTHILRIGESYKEKQRTIQAKKEVEQRRAGGYSRKYASKAKNLADDMVRNTARDLLYYAVTQDAMLIFENLSRGFGRQGKRTFMAERQYTRMEDWLTAKLAYEGLPSKTYLSKTLAQYTSKTCSNCGFTITSADYDRVLEKLKKTATGWMTTINGKELKVEGQITYYNRYKRQNVVKDLSVELDRLSEESVNNDISSWTKGRSGEALSLLKKRFSHRPVQEKFVCLNCGFETHADEQAALNIARSWLFLRSQEYKKYQTNKTTGNTDKRAFVETWQSFYRKKLKEVWKPAV

SEQ ID NO: 514 - protein, 979 aa, synthetic construct
  REGION 1..979: note = CasX variant
QEIKRINKIRRRLVKDSNTKKAGKTGPMKTLLVRVMTPDLRERLENLRKKPENIPQPISNTSRANLNKLLTDYTEMKKAILHVYWEEFQKDPVGLMSRVAQPASKKIDQNKLKPEMDEKGNLTTAGFACSQCGQPLFVYKLEQVSEKGKAYTNYFGRCNVAEHEKLILLAQLKPEKDSDEAVTYSLGKFGQRALDFYSIHVTKESTHPVKPLAQIAGNRYASGPVGKALSDACMGTIASFLSKYQDIIIEHQKVVKGNQKRLESLRELAGKENLEYPSVTLPPQPHTKEGVDAYNEVIARVRMWVNLNLWQKLKLSRDDAKPLLRLKGFPSFPLVERQANEVDWWDMVCNVKKLINEKKEDGKVFWQNLAGYKRQEALRPYLSSEEDRKKGKKFARYQLGDLLLHLEKKHGEWDWGKVYDEAWERIDKKVEGLSKHIKLEEERRSEDAQSKAALTDWLRAKASFVIEGLKEADKDEFCRCELKLQKWYGDLRGKPFAIEAENSILDISGFSKQYNCAFIWQKDGVKKLNLYLIINYFKGGKLRFKKIKPEAFEANRFYTVINKKSGEIVPMEVNFNFDDPNLIILPLAFGKRQGREFIWNDLLSLETGSLKLANGRVIEKTLYNRRTRQDEPALFVALTFERREVLDSSNIKPMNLIGVDRGENIPAVIALTDPEGCPLSRFKDSLGNPTHILRIGESYKEKQRTIQAKKEVEQRRAGGYSRKYASKAKNLADDMVRNTARDLLYYAVTQDAMLIFENLSRGFGRQGKRTFMAERQYTRMEDWLTAKLAYEGLPSKTYLSKTLAQYTSKTCSNCGFTITSADYDRVLEKLKKTATGWMTTINGKELKVEGQITYYNRYKRQNVVKDLSVELDRLSEESVNNDISSWTKGRSGEALSLLKKRFSHRPVQEKFVCLNCGFETHADEQAALNIARSWLFLRSQEYKKYQTNKTTGNTDKRAFVETWQSFYRKKLKEVWKPAV

SEQ ID NO: 515 - protein, 979 aa, synthetic construct
  REGION 1..979: note = CasX variant
QEIKRINKIRRRLVKDSNTKKAGKTGPMKTLLVRVMTPDLRERLENLRKKPENIPQPISNTSRANLNKLLTDYTEMKKAILHVYWEEFQKDPVGLMSRVAQPASKKIDQNKLKPEMDEKGNLTTAGFACSQCGQPLFVYKLEQVSEKGKAYTNYFGRCNVAEHEKLILLAQLKPEKDSDEAVTYSLGKFGQRALDFYSIHVTKESTHPVKPLAQIAGNRYASGPVGKALSDACMGTIASFLSKYQDIIIEHQKVVKGNQKRLESLRELAGKENLEYPSVTLPPQPHTKEGVDAYNEVIARVRMWVNLNLWQKLKLSRDDAKPLLRLKGFPSFPLVERQANEVDWWDMVCNVKKLINEKKEDGKVFWQNLAGYKRQEALRPYLSSEEDRKKGKKFARYQLGDLLLHLEKKHGEYDWGKVYDEAWERIDKKVEGLSKHIKLEEERRSEDAQSKAALTDWLRAKASFVIEGLKEADKDEFCRCELKLQKWYGDLRGKPFAIEAENSILDISGFSKQYNCAFIWQKDGVKKLNLYLIINYFKGGKLRFKKIKPEAFEANRFYTVINKKSGEIVPMEVNFNFDDPNLIILPLAFGKRQGREFIWNDLLSLETGSLKLANGRVIEKTLYNRRTRQDEPALFVALTFERREVLDSSNIKPMNLIGVDRGENIPAVIALTDPEGCPLSRFKDSLGNPTHILRIGESYKEKQRTIQAKKEVEQRRAGGYSRKYASKAKNLADDMVRNTARDLLYYAVTQDAMLIFENLSRGFGRQGKRTFMAERQYTRMEDWLTAKLAYEGLPSKTYLSKTLAQYTSKTCSNCGFTITSADYDRVLEKLKKTATGWMTTINGKELKVEGQITYYNRYKRQNVVKDLSVELDRLSEESVNNDISSWTKGRSGEALSLLKKRFSHRPVQEKFVCLNCGFETHADEQAALNIARSWLFLRSQEYKKYQTNKTTGNTDKRAFVETWQSFYRKKLKEVWKPAV

SEQ ID NO: 516 - protein, 979 aa, synthetic construct
  REGION 1..979: note = CasX variant
QEIKRINKIRRRLVKDSNTKKAGKTGPMKTLLVRVMTPDLRERLENLRKKPENIPQPISNTSRANLNKLLTDYTEMKKAILHVYWEEFQKDPVGLMSRVAQPASKKIDQNKLKPEMDEKGNLTTAGFACSQCGQPLFVYKLEQVSEKGKAYTNYFGRCNVAEHEKLILLAQLKPEKDSDEAVTYSLGKFGQRALDFYSIHVTKESTHPVKPLAQIAGNRYASGPVGKALSDACMGTIASFLSKYQDIIIEHQKVVKGNQKRLESLRELAGKENLEYPSVTLPPQPHTKEGVDAYNEVIARVRMWVNLNLWQKLKLSRDDAKPLLRLKGFPSFPLVERQANEVDWWDMVCNVKKLINEKKEDGKVFWQNLAGYKRQEALRPYLSSEEDRKKGKKFARYQLGDLLLHLEKKHGEDYWGKVYDEAWERIDKKVEGLSKHIKLEEERRSEDAQSKAALTDWLRAKASFVIEGLKEADKDEFCRCELKLQKWYGDLRGKPFAIEAENSILDISGFSKQYNCAFIWQKDGVKKLNLYLIINYFKGGKLRFKKIKPEAFEANRFYTVINKKSGEIVPMEVNFNFDDPNLIILPLAFGKRQGREFIWNDLLSLETGSLKLANGRVIEKTLYNRRTRQDEPALFVALTFERREVLDSSNIKPMNLIGVDRGENIPAVIALTDPEGCPLSRFKDSLGNPTHILRIGESYKEKQRTIQAKKEVEQRRAGGYSRKYASKAKNLADDMVRNTARDLLYYAVTQDAMLIFENLSRGFGRQGKRTFMAERQYTRMEDWLTAKLAYEGLPSKTYLSKTLAQYTSKTCSNCGFTITSADYDRVLEKLKKTATGWMTTINGKELKVEGQITYYNRYKRQNVVKDLSVELDRLSEESVNNDISSWTKGRSGEALSLLKKRFSHRPVQEKFVCLNCGFETHADEQAALNIARSWLFLRSQEYKKYQTNKTTGNTDKRAFVETWQSFYRKKLKEVWKPAV

SEQ ID NO: 517 - protein, 978 aa, synthetic construct
  REGION 1..978: note = CasX variant
QEIKRINKIRRRLVKDSNTKKAGKTGPMKTLLVRVMTPDLRERLENLRKKPENIPQPISNTSRANLNKLLTDYTEMKKAILHVYWEEFQKDPVGLMSRVAQPASKKIDQNKLKPEMDEKGNLTTAGFACSQCGQPLFVYKLEQVSEKGKAYTNYFGRCNVAEHEKLILLAQLKPEKDSDEAVTYSLGKFGQRALDFYSIHVTKESTHPVKPLAQIAGNRYASGPVGKALSDACMGTIASFLSKYQDIIIEHQKVVKGNQKRLESLRELAGKENLEYPSVTLPPQPHTKEGVDAYNEVIARVRMWVNLNLWQKLKLSRDDAKPLLRLKGFPSFPLVERQANEVDWWDMVCNVKKLINEKKEDGKVFWQNLAGYKRQEALRPYLSSEEDRKKGKKFARYQLGDLLLHLEKKHGEDRGKVYDEAWERIDKKVEGLSKHIKLEEERRSEDAQSKAALTDWLRAKASFVIEGLKEADKDEFCRCELKLQKWYGDLRGKPFAIEAENSILDISGFSKQYNCAFIWQKDGVKKLNLYLIINYFKGGKLRFKKIKPEAFEANRFYTVINKKSGEIVPMEVNFNFDDPNLIILPLAFGKRQGREFIWNDLLSLETGSLKLANGRVIEKTLYNRRTRQDEPALFVALTFERREVLDSSNIKPMNLIGVDRGENIPAVIALTDPEGCPLSRFKDSLGNPTHILRIGESYKEKQRTIQAKKEVEQRRAGGYSRKYASKAKNLADDMVRNTARDLLYYAVTQDAMLIFENLSRGFGRQGKRTFMAERQYTRMEDWLTAKLAYEGLPSKTYLSKTLAQYTSKTCSNCGFTITSADYDRVLEKLKKTATGWMTTINGKELKVEGQITYYNRYKRQNVVKDLSVELDRLSEESVNNDISSWTKGRSGEALSLLKKRFSHRPVQEKFVCLNCGFETHADEQAALNIARSWLFLRSQEYKKYQTNKTTGNTDKRAFVETWQSFYRKKLKEVWKPAV

SEQ ID NO: 518 - protein, 978 aa, synthetic construct
  REGION 1..978: note = CasX variant
QEIKRINKIRRRLVKDSNTKKAGKTGPMKTLLVRVMTPDLRERLENLRKKPENIPQPISNTSRANLNKLLTDYTEMKKAILHVYWEEFQKDPVGLMSRVAQPASKKIDQNKLKPEMDEKGNLTTAGFACSQCGQPLFVYKLEQVSEKGKAYTNYFGRCNVAEHEKLILLAQLKPEKDSDEAVTYSLGKFGQRALDFYSIHVTKESTHPVKPLAQIAGNRYASGPVGKALSDACMGTIASFLSKYQDIIIEHQKVVKGNQKRLESLRELAGKENLEYPSVTLPPQPHTKEGVDAYNEVIARVRMWVNLNLWQKLKLSRDDAKPLLRLKGFPSFPLVERQANEVDWWDMVCNVKKLINEKKEDGKVFWQNLAGYKRQEALRPYLSSEEDRKKGKKFARYQLGDLLLHLEKKHGEDWGDVYDEAWERIDKKVEGLSKHIKLEEERRSEDAQSKAALTDWLRAKASFVIEGLKEADKDEFCRCELKLQKWYGDLRGKPFAIEAENSILDISGFSKQYNCAFIWQKDGVKKLNLYLIINYFKGGKLRFKKIKPEAFEANRFYTVINKKSGEIVPMEVNFNFDDPNLIILPLAFGKRQGREFIWNDLLSLETGSLKLANGRVIEKTLYNRRTRQDEPALFVALTFERREVLDSSNIKPMNLIGVDRGENIPAVIALTDPEGCPLSRFKDSLGNPTHILRIGESYKEKQRTIQAKKEVEQRRAGGYSRKYASKAKNLADDMVRNTARDLLYYAVTQDAMLIFENLSRGFGRQGKRTFMAERQYTRMEDWLTAKLAYEGLPSKTYLSKTLAQYTSKTCSNCGFTITSADYDRVLEKLKKTATGWMTTINGKELKVEGQITYYNRYKRQNVVKDLSVELDRLSEESVNNDISSWTKGRSGEALSLLKKRFSHRPVQEKFVCLNCGFETHADEQAALNIARSWLFLRSQEYKKYQTNKTTGNTDKRAFVETWQSFYRKKLKEVWKPAV

SEQ ID NO: 519 - protein, 978 aa, synthetic construct
  REGION 1..978: note = CasX variant
QEIKRINKIRRRLVKDSNTKKAGKTGPMKTLLVRVMTPDLRERLENLRKKPENIPQPISNTSRANLNKLLTDYTEMKKAILHVYWEEFQKDPVGLMSRVAQPASKKIDQNKLKPEMDEKGNLTTAGFACSQCGQPLFVYKLEQVSEKGKAYTNYFGRCNVAEHEKLILLAQLKPEKDSDEAVTYSLGKFGQRALDFYSIHVTKESTHPVKPLAQIAGNRYASGPVGKALSDACMGTIASFLSKYQDIIIEHQKVVKGNQKRLESLRELAGKENLEYPSVTLPPQPHTKEGVDAYNEVIARVRMWVNLNLWQKLKLSRDDAKPLLRLKGFPSFPLVERQANEVDWWDMVCNVKKLINEKKEDGKVFWQNLAGYKRQEALRPYLSSEEDRKKGKKFARYQLGDLLLHLEKKHGEDWGPVYDEAWERIDKKVEGLSKHIKLEEERRSEDAQSKAALTDWLRAKASFVIEGLKEADKDEFCRCELKLQKWYGDLRGKPFAIEAENSILDISGFSKQYNCAFIWQKDGVKKLNLYLIINYFKGGKLRFKKIKPEAFEANRFYTVINKKSGEIVPMEVNFNFDDPNLIILPLAFGKRQGREFIWNDLLSLETGSLKLANGRVIEKTLYNRRTRQDEPALFVALTFERREVLDSSNIKPMNLIGVDRGENIPAVIALTDPEGCPLSRFKDSLGNPTHILRIGESYKEKQRTIQAKKEVEQRRAGGYSRKYASKAKNLADDMVRNTARDLLYYAVTQDAMLIFENLSRGFGRQGKRTFMAERQYTRMEDWLTAKLAYEGLPSKTYLSKTLAQYTSKTCSNCGFTITSADYDRVLEKLKKTATGWMTTINGKELKVEGQITYYNRYKRQNVVKDLSVELDRLSEESVNNDISSWTKGRSGEALSLLKKRFSHRPVQEKFVCLNCGFETHADEQAALNIARSWLFLRSQEYKKYQTNKTTGNTDKRAFVETWQSFYRKKLKEVWKPAV

SEQ ID NO: 520 - protein, 978 aa, synthetic construct
  REGION 1..978: note = CasX variant
QEIKRINKIRRRLVKDSNTKKAGKTGPMKTLLVRVMTPDLRERLENLRKKPENIPQPISNTSRANLNKLLTDYTEMKKAILHVYWEEFQKDPVGLMSRVAQPASKKIDQNKLKPEMDEKGNLTTAGFACSQCGQPLFVYKLEQVSEKGKAYTNYFGRCNVAEHEKLILLAQLKPEKDSDEAVTYSLGKFGQRALDFYSIHVTKESTHPVKPLAQIAGNRYASGPVGKALSDACMGTIASFLSKYQDIIIEHQKVVKGNQKRLESLRELAGKENLEYPSVTLPPQPHTKEGVDAYNEVIARVRMWVNLNLWQKLKLSRDDAKPLLRLKGFPSFPLVERQANEVDWWDMVCNVKKLINEKKEDGKVFWQNLAGYKRQEALRPYLSSEEDRKKGKKFARYQLGDLLLHLEKKHGEDWGKLYDEAWERIDKKVEGLSKHIKLEEERRSEDAQSKAALTDWLRAKASFVIEGLKEADKDEFCRCELKLQKWYGDLRGKPFAIEAENSILDISGFSKQYNCAFIWQKDGVKKLNLYLIINYFKGGKLRFKKIKPEAFEANRFYTVINKKSGEIVPMEVNFNFDDPNLIILPLAFGKRQGREFIWNDLLSLETGSLKLANGRVIEKTLYNRRTRQDEPALFVALTFERREVLDSSNIKPMNLIGVDRGENIPAVIALTDPEGCPLSRFKDSLGNPTHILRIGESYKEKQRTIQAKKEVEQRRAGGYSRKYASKAKNLADDMVRNTARDLLYYAVTQDAMLIFENLSRGFGRQGKRTFMAERQYTRMEDWLTAKLAYEGLPSKTYLSKTLAQYTSKTCSNCGFTITSADYDRVLEKLKKTATGWMTTINGKELKVEGQITYYNRYKRQNVVKDLSVELDRLSEESVNNDISSWTKGRSGEALSLLKKRFSHRPVQEKFVCLNCGFETHADEQAALNIARSWLFLRSQEYKKYQTNKTTGNTDKRAFVETWQSFYRKKLKEVWKPAV

SEQ ID NO: 521 - protein, 978 aa, synthetic construct
  REGION 1..978: note = CasX variant
QEIKRINKIRRRLVKDSNTKKAGKTGPMKTLLVRVMTPDLRERLENLRKKPENIPQPISNTSRANLNKLLTDYTEMKKAILHVYWEEFQKDPVGLMSRVAQPASKKIDQNKLKPEMDEKGNLTTAGFACSQCGQPLFVYKLEQVSEKGKAYTNYFGRCNVAEHEKLILLAQLKPEKDSDEAVTYSLGKFGQRALDFYSIHVTKESTHPVKPLAQIAGNRYASGPVGKALSDACMGTIASFLSKYQDIIIEHQKVVKGNQKRLESLRELAGKENLEYPSVTLPPQPHTKEGVDAYNEVIARVRMWVNLNLWQKLKLSRDDAKPLLRLKGFPSFPLVERQANEVDWWDMVCNVKKLINEKKEDGKVFWQNLAGYKRQEALRPYLSSEEDRKKGKKFARYQLGDLLLHLEKKHGEDWGKVYGEAWERIDKKVEGLSKHIKLEEERRSEDAQSKAALTDWLRAKASFVIEGLKEADKDEFCRCELKLQKWYGDLRGKPFAIEAENSILDISGFSKQYNCAFIWQKDGVKKLNLYLIINYFKGGKLRFKKIKPEAFEANRFYTVINKKSGEIVPMEVNFNFDDPNLIILPLAFGKRQGREFIWNDLLSLETGSLKLANGRVIEKTLYNRRTRQDEPALFVALTFERREVLDSSNIKPMNLIGVDRGENIPAVIALTDPEGCPLSRFKDSLGNPTHILRIGESYKEKQRTIQAKKEVEQRRAGGYSRKYASKAKNLADDMVRNTARDLLYYAVTQDAMLIFENLSRGFGRQGKRTFMAERQYTRMEDWLTAKLAYEGLPSKTYLSKTLAQYTSKTCSNCGFTITSADYDRVLEKLKKTATGWMTTINGKELKVEGQITYYNRYKRQNVVKDLSVELDRLSEESVNNDISSWTKGRSGEALSLLKKRFSHRPVQEKFVCLNCGFETHADEQAALNIARSWLFLRSQEYKKYQTNKTTGNTDKRAFVETWQSFYRKKLKEVWKPAV

SEQ ID NO: 522 - protein, 978 aa, synthetic construct
  REGION 1..978: note = CasX variant
QEIKRINKIRRRLVKDSNTKKAGKTGPMKTLLVRVMTPDLRERLENLRKKPENIPQPISNTSRANLNKLLTDYTEMKKAILHVYWEEFQKDPVGLMSRVAQPASKKIDQNKLKPEMDEKGNLTTAGFACSQCGQPLFVYKLEQVSEKGKAYTNYFGRCNVAEHEKLILLAQLKPEKDSDEAVTYSLGKFGQRALDFYSIHVTKESTHPVKPLAQIAGNRYASGPVGKALSDACMGTIASFLSKYQDIIIEHQKVVKGNQKRLESLRELAGKENLEYPSVTLPPQPHTKEGVDAYNEVIARVRMWVNLNLWQKLKLSRDDAKPLLRLKGFPSFPLVERQANEVDWWDMVCNVKKLINEKKEDGKVFWQNLAGYKRQEALRPYLSSEEDRKKGKKFARYQLGDLLLHLEKKHGEDWGKVYDEAWERIDKKVEGLSKHQKLEEERRSEDAQSKAALTDWLRAKASFVIEGLKEADKDEFCRCELKLQKWYGDLRGKPFAIEAENSILDISGFSKQYNCAFIWQKDGVKKLNLYLIINYFKGGKLRFKKIKPEAFEANRFYTVINKKSGEIVPMEVNFNFDDPNLIILPLAFGKRQGREFIWNDLLSLETGSLKLANGRVIEKTLYNRRTRQDEPALFVALTFERREVLDSSNIKPMNLIGVDRGENIPAVIALTDPEGCPLSRFKDSLGNPTHILRIGESYKEKQRTIQAKKEVEQRRAGGYSRKYASKAKNLADDMVRNTARDLLYYAVTQDAMLIFENLSRGFGRQGKRTFMAERQYTRMEDWLTAKLAYEGLPSKTYLSKTLAQYTSKTCSNCGFTITSADYDRVLEKLKKTATGWMTTINGKELKVEGQITYYNRYKRQNVVKDLSVELDRLSEESVNNDISSWTKGRSGEALSLLKKRFSHRPVQEKFVCLNCGFETHADEQAALNIARSWLFLRSQEYKKYQTNKTTGNTDKRAFVETWQSFYRKKLKEVWKPAV

SEQ ID NO: 523 - protein, 978 aa, synthetic construct
  REGION 1..978: note = CasX variant
QEIKRINKIRRRLVKDSNTKKAGKTGPMKTLLVRVMTPDLRERLENLRKKPENIPQPISNTSRANLNKLLTDYTEMKKAILHVYWEEFQKDPVGLMSRVAQPASKKIDQNKLKPEMDEKGNLTTAGFACSQCGQPLFVYKLEQVSEKGKAYTNYFGRCNVAEHEKLILLAQLKPEKDSDEAVTYSLGKFGQRALDFYSIHVTKESTHPVKPLAQIAGNRYASGPVGKALSDACMGTIASFLSKYQDIIIEHQKVVKGNQKRLESLRELAGKENLEYPSVTLPPQPHTKEGVDAYNEVIARVRMWVNLNLWQKLKLSRDDAKPLLRLKGFPSFPLVERQANEVDWWDMVCNVKKLINEKKEDGKVFWQNLAGYKRQEALRPYLSSEEDRKKGKKFARYQLGDLLLHLEKKHGEDWGKVYDEAWERIDKKVEGLSKHIKLEEEDRSEDAQSKAALTDWLRAKASFVIEGLKEADKDEFCRCELKLQKWYGDLRGKPFAIEAENSILDISGFSKQYNCAFIWQKDGVKKLNLYLIINYFKGGKLRFKKIKPEAFEANRFYTVINKKSGEIVPMEVNFNFDDPNLIILPLAFGKRQGREFIWNDLLSLETGSLKLANGRVIEKTLYNRRTRQDEPALFVALTFERREVLDSSNIKPMNLIGVDRGENIPAVIALTDPEGCPLSRFKDSLGNPTHILRIGESYKEKQRTIQAKKEVEQRRAGGYSRKYASKAKNLADDMVRNTARDLLYYAVTQDAMLIFENLSRGFGRQGKRTFMAERQYTRMEDWLTAKLAYEGLPSKTYLSKTLAQYTSKTCSNCGFTITSADYDRVLEKLKKTATGWMTTINGKELKVEGQITYYNRYKRQNVVKDLSVELDRLSEESVNNDISSWTKGRSGEALSLLKKRFSHRPVQEKFVCLNCGFETHADEQAALNIARSWLFLRSQEYKKYQTNKTTGNTDKRAFVETWQSFYRKKLKEVWKPAV

SEQ ID NO: 524 - protein, 978 aa, synthetic construct
  REGION 1..978: note = CasX variant
QEIKRINKIRRRLVKDSNTKKAGKTGPMKTLLVRVMTPDLRERLENLRKKPENIPQPISNTSRANLNKLLTDYTEMKKAILHVYWEEFQKDPVGLMSRVAQPASKKIDQNKLKPEMDEKGNLTTAGFACSQCGQPLFVYKLEQVSEKGKAYTNYFGRCNVAEHEKLILLAQLKPEKDSDEAVTYSLGKFGQRALDFYSIHVTKESTHPVKPLAQIAGNRYASGPVGKALSDACMGTIASFLSKYQDIIIEHQKVVKGNQKRLESLRELAGKENLEYPSVTLPPQPHTKEGVDAYNEVIARVRMWVNLNLWQKLKLSRDDAKPLLRLKGFPSFPLVERQANEVDWWDMVCNVKKLINEKKEDGKVFWQNLAGYKRQEALRPYLSSEEDRKKGKKFARYQLGDLLLHLEKKHGEDWGKVYDEAWERIDKKVEGLSKHIKLEEERRSEDAQSKAATTDWLRAKASFVIEGLKEADKDEFCRCELKLQKWYGDLRGKPFAIEAENSILDISGFSKQYNCAFIWQKDGVKKLNLYLIINYFKGGKLRFKKIKPEAFEANRFYTVINKKSGEIVPMEVNFNFDDPNLIILPLAFGKRQGREFIWNDLLSLETGSLKLANGRVIEKTLYNRRTRQDEPALFVALTFERREVLDSSNIKPMNLIGVDRGENIPAVIALTDPEGCPLSRFKDSLGNPTHILRIGESYKEKQRTIQAKKEVEQRRAGGYSRKYASKAKNLADDMVRNTARDLLYYAVTQDAMLIFENLSRGFGRQGKRTFMAERQYTRMEDWLTAKLAYEGLPSKTYLSKTLAQYTSKTCSNCGFTITSADYDRVLEKLKKTATGWMTTINGKELKVEGQITYYNRYKRQNVVKDLSVELDRLSEESVNNDISSWTKGRSGEALSLLKKRFSHRPVQEKFVCLNCGFETHADEQAALNIARSWLFLRSQEYKKYQTNKTTGNTDKRAFVETWQSFYRKKLKEVWKPAV

SEQ ID NO: 525 - protein, 978 aa, synthetic construct
  REGION 1..978: note = CasX variant
QEIKRINKIRRRLVKDSNTKKAGKTGPMKTLLVRVMTPDLRERLENLRKKPENIPQPISNTSRANLNKLLTDYTEMKKAILHVYWEEFQKDPVGLMSRVAQPASKKIDQNKLKPEMDEKGNLTTAGFACSQCGQPLFVYKLEQVSEKGKAYTNYFGRCNVAEHEKLILLAQLKPEKDSDEAVTYSLGKFGQRALDFYSIHVTKESTHPVKPLAQIAGNRYASGPVGKALSDACMGTIASFLSKYQDIIIEHQKVVKGNQKRLESLRELAGKENLEYPSVTLPPQPHTKEGVDAYNEVIARVRMWVNLNLWQKLKLSRDDAKPLLRLKGFPSFPLVERQANEVDWWDMVCNVKKLINEKKEDGKVFWQNLAGYKRQEALRPYLSSEEDRKKGKKFARYQLGDLLLHLEKKHGEDWGKVYDEAWERIDKKVEGLSKHIKLEEERRSEDAQSKAALTDWLRAKTSFVIEGLKEADKDEFCRCELKLQKWYGDLRGKPFAIEAENSILDISGFSKQYNCAFIWQKDGVKKLNLYLIINYFKGGKLRFKKIKPEAFEANRFYTVINKKSGEIVPMEVNFNFDDPNLIILPLAFGKRQGREFIWNDLLSLETGSLKLANGRVIEKTLYNRRTRQDEPALFVALTFERREVLDSSNIKPMNLIGVDRGENIPAVIALTDPEGCPLSRFKDSLGNPTHILRIGESYKEKQRTIQAKKEVEQRRAGGYSRKYASKAKNLADDMVRNTARDLLYYAVTQDAMLIFENLSRGFGRQGKRTFMAERQYTRMEDWLTAKLAYEGLPSKTYLSKTLAQYTSKTCSNCGFTITSADYDRVLEKLKKTATGWMTTINGKELKVEGQITYYNRYKRQNVVKDLSVELDRLSEESVNNDISSWTKGRSGEALSLLKKRFSHRPVQEKFVCLNCGFETHADEQAALNIARSWLFLRSQEYKKYQTNKTTGNTDKRAFVETWQSFYRKKLKEVWKPAV

SEQ ID NO: 526 - protein, 978 aa, synthetic construct
  REGION 1..978: note = CasX variant
QEIKRINKIRRRLVKDSNTKKAGKTGPMKTLLVRVMTPDLRERLENLRKKPENIPQPISNTSRANLNKLLTDYTEMKKAILHVYWEEFQKDPVGLMSRVAQPASKKIDQNKLKPEMDEKGNLTTAGFACSQCGQPLFVYKLEQVSEKGKAYTNYFGRCNVAEHEKLILLAQLKPEKDSDEAVTYSLGKFGQRALDFYSIHVTKESTHPVKPLAQIAGNRYASGPVGKALSDACMGTIASFLSKYQDIIIEHQKVVKGNQKRLESLRELAGKENLEYPSVTLPPQPHTKEGVDAYNEVIARVRMWVNLNLWQKLKLSRDDAKPLLRLKGFPSFPLVERQANEVDWWDMVCNVKKLINEKKEDGKVFWQNLAGYKRQEALRPYLSSEEDRKKGKKFARYQLGDLLLHLEKKHGEDWGKVYDEAWERIDKKVEGLSKHIKLEEERRSEDAQSKAALTDWLRAKKSFVIEGLKEADKDEFCRCELKLQKWYGDLRGKPFAIEAENSILDISGFSKQYNCAFIWQKDGVKKLNLYLIINYFKGGKLRFKKIKPEAFEANRFYTVINKKSGEIVPMEVNFNFDDPNLIILPLAFGKRQGREFIWNDLLSLETGSLKLANGRVIEKTLYNRRTRQDEPALFVALTFERREVLDSSNIKPMNLIGVDRGENIPAVIALTDPEGCPLSRFKDSLGNPTHILRIGESYKEKQRTIQAKKEVEQRRAGGYSRKYASKAKNLADDMVRNTARDLLYYAVTQDAMLIFENLSRGFGRQGKRTFMAERQYTRMEDWLTAKLAYEGLPSKTYLSKTLAQYTSKTCSNCGFTITSADYDRVLEKLKKTATGWMTTINGKELKVEGQITYYNRYKRQNVVKDLSVELDRLSEESVNNDISSWTKGRSGEALSLLKKRFSHRPVQEKFVCLNCGFETHADEQAALNIARSWLFLRSQEYKKYQTNKTTGNTDKRAFVETWQSFYRKKLKEVWKPAV

SEQ ID NO: 527 - protein, 978 aa, synthetic construct
  REGION 1..978: note = CasX variant
QEIKRINKIRRRLVKDSNTKKAGKTGPMKTLLVRVMTPDLRERLENLRKKPENIPQPISNTSRANLNKLLTDYTEMKKAILHVYWEEFQKDPVGLMSRVAQPASKKIDQNKLKPEMDEKGNLTTAGFACSQCGQPLFVYKLEQVSEKGKAYTNYFGRCNVAEHEKLILLAQLKPEKDSDEAVTYSLGKFGQRALDFYSIHVTKESTHPVKPLAQIAGNRYASGPVGKALSDACMGTIASFLSKYQDIIIEHQKVVKGNQKRLESLRELAGKENLEYPSVTLPPQPHTKEGVDAYNEVIARVRMWVNLNLWQKLKLSRDDAKPLLRLKGFPSFPLVERQANEVDWWDMVCNVKKLINEKKEDGKVFWQNLAGYKRQEALRPYLSSEEDRKKGKKFARYQLGDLLLHLEKKHGEDWGKVYDEAWERIDKKVEGLSKHIKLEEERRSEDAQSKAALTDWLRAKASFVEEGLKEADKDEFCRCELKLQKWYGDLRGKPFAIEAENSILDISGFSKQYNCAFIWQKDGVKKLNLYLIINYFKGGKLRFKKIKPEAFEANRFYTVINKKSGEIVPMEVNFNFDDPNLIILPLAFGKRQGREFIWNDLLSLETGSLKLANGRVIEKTLYNRRTRQDEPALFVALTFERREVLDSSNIKPMNLIGVDRGENIPAVIALTDPEGCPLSRFKDSLGNPTHILRIGESYKEKQRTIQAKKEVEQRRAGGYSRKYASKAKNLADDMVRNTARDLLYYAVTQDAMLIFENLSRGFGRQGKRTFMAERQYTRMEDWLTAKLAYEGLPSKTYLSKTLAQYTSKTCSNCGFTITSADYDRVLEKLKKTATGWMTTINGKELKVEGQITYYNRYKRQNVVKDLSVELDRLSEESVNNDISSWTKGRSGEALSLLKKRFSHRPVQEKFVCLNCGFETHADEQAALNIARSWLFLRSQEYKKYQTNKTTGNTDKRAFVETWQSFYRKKLKEVWKPAV

SEQ ID NO: 528 - protein, 979 aa, synthetic construct
  REGION 1..979: note = CasX variant
QEIKRINKIRRRLVKDSNTKKAGKTGPMKTLLVRVMTPDLRERLENLRKKPENIPQPISNTSRANLNKLLTDYTEMKKAILHVYWEEFQKDPVGLMSRVAQPASKKIDQNKLKPEMDEKGNLTTAGFACSQCGQPLFVYKLEQVSEKGKAYTNYFGRCNVAEHEKLILLAQLKPEKDSDEAVTYSLGKFGQRALDFYSIHVTKESTHPVKPLAQIAGNRYASGPVGKALSDACMGTIASFLSKYQDIIIEHQKVVKGNQKRLESLRELAGKENLEYPSVTLPPQPHTKEGVDAYNEVIARVRMWVNLNLWQKLKLSRDDAKPLLRLKGFPSFPLVERQANEVDWWDMVCNVKKLINEKKEDGKVFWQNLAGYKRQEALRPYLSSEEDRKKGKKFARYQLGDLLLHLEKKHGEDWGKVYDEAWERIDKKVEGLSKHIKLEEERRSEDAQSKAALTDWLRAKASFVISEGLKEADKDEFCRCELKLQKWYGDLRGKPFAIEAENSILDISGFSKQYNCAFIWQKDGVKKLNLYLIINYFKGGKLRFKKIKPEAFEANRFYTVINKKSGEIVPMEVNFNFDDPNLIILPLAFGKRQGREFIWNDLLSLETGSLKLANGRVIEKTLYNRRTRQDEPALFVALTFERREVLDSSNIKPMNLIGVDRGENIPAVIALTDPEGCPLSRFKDSLGNPTHILRIGESYKEKQRTIQAKKEVEQRRAGGYSRKYASKAKNLADDMVRNTARDLLYYAVTQDAMLIFENLSRGFGRQGKRTFMAERQYTRMEDWLTAKLAYEGLPSKTYLSKTLAQYTSKTCSNCGFTITSADYDRVLEKLKKTATGWMTTINGKELKVEGQITYYNRYKRQNVVKDLSVELDRLSEESVNNDISSWTKGRSGEALSLLKKRFSHRPVQEKFVCLNCGFETHADEQAALNIARSWLFLRSQEYKKYQTNKTTGNTDKRAFVETWQSFYRKKLKEVWKPAV

SEQ ID NO: 529 - protein, 979 aa, synthetic construct
  REGION 1..979: note = CasX variant
QEIKRINKIRRRLVKDSNTKKAGKTGPMKTLLVRVMTPDLRERLENLRKKPENIPQPISNTSRANLNKLLTDYTEMKKAILHVYWEEFQKDPVGLMSRVAQPASKKIDQNKLKPEMDEKGNLTTAGFACSQCGQPLFVYKLEQVSEKGKAYTNYFGRCNVAEHEKLILLAQLKPEKDSDEAVTYSLGKFGQRALDFYSIHVTKESTHPVKPLAQIAGNRYASGPVGKALSDACMGTIASFLSKYQDIIIEHQKVVKGNQKRLESLRELAGKENLEYPSVTLPPQPHTKEGVDAYNEVIARVRMWVNLNLWQKLKLSRDDAKPLLRLKGFPSFPLVERQANEVDWWDMVCNVKKLINEKKEDGKVFWQNLAGYKRQEALRPYLSSEEDRKKGKKFARYQLGDLLLHLEKKHGEDWGKVYDEAWERIDKKVEGLSKHIKLEEERRSEDAQSKAALTDWLRAKASFVIERGLKEADKDEFCRCELKLQKWYGDLRGKPFAIEAENSILDISGFSKQYNCAFIWQKDGVKKLNLYLIINYFKGGKLRFKKIKPEAFEANRFYTVINKKSGEIVPMEVNFNFDDPNLIILPLAFGKRQGREFIWNDLLSLETGSLKLANGRVIEKTLYNRRTRQDEPALFVALTFERREVLDSSNIKPMNLIGVDRGENIPAVIALTDPEGCPLSRFKDSLGNPTHILRIGESYKEKQRTIQAKKEVEQRRAGGYSRKYASKAKNLADDMVRNTARDLLYYAVTQDAMLIFENLSRGFGRQGKRTFMAERQYTRMEDWLTAKLAYEGLPSKTYLSKTLAQYTSKTCSNCGFTITSADYDRVLEKLKKTATGWMTTINGKELKVEGQITYYNRYKRQNVVKDLSVELDRLSEESVNNDISSWTKGRSGEALSLLKKRFSHRPVQEKFVCLNCGFETHADEQAALNIARSWLFLRSQEYKKYQTNKTTGNTDKRAFVETWQSFYRKKLKEVWKPAV

SEQ ID NO: 530 - protein, 978 aa, synthetic construct
  REGION 1..978: note = CasX variant
QEIKRINKIRRRLVKDSNTKKAGKTGPMKTLLVRVMTPDLRERLENLRKKPENIPQPISNTSRANLNKLLTDYTEMKKAILHVYWEEFQKDPVGLMSRVAQPASKKIDQNKLKPEMDEKGNLTTAGFACSQCGQPLFVYKLEQVSEKGKAYTNYFGRCNVAEHEKLILLAQLKPEKDSDEAVTYSLGKFGQRALDFYSIHVTKESTHPVKPLAQIAGNRYASGPVGKALSDACMGTIASFLSKYQDIIIEHQKVVKGNQKRLESLRELAGKENLEYPSVTLPPQPHTKEGVDAYNEVIARVRMWVNLNLWQKLKLSRDDAKPLLRLKGFPSFPLVERQANEVDWWDMVCNVKKLINEKKEDGKVFWQNLAGYKRQEALRPYLSSEEDRKKGKKFARYQLGDLLLHLEKKHGEDWGKVYDEAWERIDKKVEGLSKHIKLEEERRSEDAQSKAALTDWLRAKASFVIEGKKEADKDEFCRCELKLQKWYGDLRGKPFAIEAENSILDISGFSKQYNCAFIWQKDGVKKLNLYLIINYFKGGKLRFKKIKPEAFEANRFYTVINKKSGEIVPMEVNFNFDDPNLIILPLAFGKRQGREFIWNDLLSLETGSLKLANGRVIEKTLYNRRTRQDEPALFVALTFERREVLDSSNIKPMNLIGVDRGENIPAVIALTDPEGCPLSRFKDSLGNPTHILRIGESYKEKQRTIQAKKEVEQRRAGGYSRKYASKAKNLADDMVRNTARDLLYYAVTQDAMLIFENLSRGFGRQGKRTFMAERQYTRMEDWLTAKLAYEGLPSKTYLSKTLAQYTSKTCSNCGFTITSADYDRVLEKLKKTATGWMTTINGKELKVEGQITYYNRYKRQNVVKDLSVELDRLSEESVNNDISSWTKGRSGEALSLLKKRFSHRPVQEKFVCLNCGFETHADEQAALNIARSWLFLRSQEYKKYQTNKTTGNTDKRAFVETWQSFYRKKLKEVWKPAV

SEQ ID NO: 531 - protein, 978 aa, synthetic construct
  REGION 1..978: note = CasX variant
QEIKRINKIRRRLVKDSNTKKAGKTGPMKTLLVRVMTPDLRERLENLRKKPENIPQPISNTSRANLNKLLTDYTEMKKAILHVYWEEFQKDPVGLMSRVAQPASKKIDQNKLKPEMDEKGNLTTAGFACSQCGQPLFVYKLEQVSEKGKAYTNYFGRCNVAEHEKLILLAQLKPEKDSDEAVTYSLGKFGQRALDFYSIHVTKESTHPVKPLAQIAGNRYASGPVGKALSDACMGTIASFLSKYQDIIIEHQKVVKGNQKRLESLRELAGKENLEYPSVTLPPQPHTKEGVDAYNEVIARVRMWVNLNLWQKLKLSRDDAKPLLRLKGFPSFPLVERQANEVDWWDMVCNVKKLINEKKEDGKVFWQNLAGYKRQEALRPYLSSEEDRKKGKKFARYQLGDLLLHLEKKHGEDWGKVYDEAWERIDKKVEGLSKHIKLEEERRSEDAQSKAALTDWLRAKASFVIEGSKEADKDEFCRCELKLQKWYGDLRGKPFAIEAENSILDISGFSKQYNCAFIWQKDGVKKLNLYLIINYFKGGKLRFKKIKPEAFEANRFYTVINKKSGEIVPMEVNFNFDDPNLIILPLAFGKRQGREFIWNDLLSLETGSLKLANGRVIEKTLYNRRTRQDEPALFVALTFERREVLDSSNIKPMNLIGVDRGENIPAVIALTDPEGCPLSRFKDSLGNPTHILRIGESYKEKQRTIQAKKEVEQRRAGGYSRKYASKAKNLADDMVRNTARDLLYYAVTQDAMLIFENLSRGFGRQGKRTFMAERQYTRMEDWLTAKLAYEGLPSKTYLSKTLAQYTSKTCSNCGFTITSADYDRVLEKLKKTATGWMTTINGKELKVEGQITYYNRYKRQNVVKDLSVELDRLSEESVNNDISSWTKGRSGEALSLLKKRFSHRPVQEKFVCLNCGFETHADEQAALNIARSWLFLRSQEYKKYQTNKTTGNTDKRAFVETWQSFYRKKLKEVWKPAV

SEQ ID NO: 532 - protein, 979 aa, synthetic construct
  REGION 1..979: note = CasX variant
QEIKRINKIRRRLVKDSNTKKAGKTGPMKTLLVRVMTPDLRERLENLRKKPENIPQPISNTSRANLNKLLTDYTEMKKAILHVYWEEFQKDPVGLMSRVAQPASKKIDQNKLKPEMDEKGNLTTAGFACSQCGQPLFVYKLEQVSEKGKAYTNYFGRCNVAEHEKLILLAQLKPEKDSDEAVTYSLGKFGQRALDFYSIHVTKESTHPVKPLAQIAGNRYASGPVGKALSDACMGTIASFLSKYQDIIIEHQKVVKGNQKRLESLRELAGKENLEYPSVTLPPQPHTKEGVDAYNEVIARVRMWVNLNLWQKLKLSRDDAKPLLRLKGFPSFPLVERQANEVDWWDMVCNVKKLINEKKEDGKVFWQNLAGYKRQEALRPYLSSEEDRKKGKKFARYQLGDLLLHLEKKHGEDWGKVYDEAWERIDKKVEGLSKHIKLEEERRSEDAQSKAALTDWLRAKASFVIEGLKEADDKDEFCRCELKLQKWYGDLRGKPFAIEAENSILDISGFSKQYNCAFIWQKDGVKKLNLYLIINYFKGGKLRFKKIKPEAFEANRFYTVINKKSGEIVPMEVNFNFDDPNLIILPLAFGKRQGREFIWNDLLSLETGSLKLANGRVIEKTLYNRRTRQDEPALFVALTFERREVLDSSNIKPMNLIGVDRGENIPAVIALTDPEGCPLSRFKDSLGNPTHILRIGESYKEKQRTIQAKKEVEQRRAGGYSRKYASKAKNLADDMVRNTARDLLYYAVTQDAMLIFENLSRGFGRQGKRTFMAERQYTRMEDWLTAKLAYEGLPSKTYLSKTLAQYTSKTCSNCGFTITSADYDRVLEKLKKTATGWMTTINGKELKVEGQITYYNRYKRQNVVKDLSVELDRLSEESVNNDISSWTKGRSGEALSLLKKRFSHRPVQEKFVCLNCGFETHADEQAALNIARSWLFLRSQEYKKYQTNKTTGNTDKRAFVETWQSFYRKKLKEVWKPAV

SEQ ID NO: 533 - protein, 979 aa, synthetic construct
  REGION 1..979: note = CasX variant
QEIKRINKIRRRLVKDSNTKKAGKTGPMKTLLVRVMTPDLRERLENLRKKPENIPQPISNTSRANLNKLLTDYTEMKKAILHVYWEEFQKDPVGLMSRVAQPASKKIDQNKLKPEMDEKGNLTTAGFACSQCGQPLFVYKLEQVSEKGKAYTNYFGRCNVAEHEKLILLAQLKPEKDSDEAVTYSLGKFGQRALDFYSIHVTKESTHPVKPLAQIAGNRYASGPVGKALSDACMGTIASFLSKYQDIIIEHQKVVKGNQKRLESLRELAGKENLEYPSVTLPPQPHTKEGVDAYNEVIARVRMWVNLNLWQKLKLSRDDAKPLLRLKGFPSFPLVERQANEVDWWDMVCNVKKLINEKKEDGKVFWQNLAGYKRQEALRPYLSSEEDRKKGKKFARYQLGDLLLHLEKKHGEDWGKVYDEAWERIDKKVEGLSKHIKLEEERRSEDAQSKAALTDWLRAKASFVIEGLKEADKDQEFCRCELKLQKWYGDLRGKPFAIEAENSILDISGFSKQYNCAFIWQKDGVKKLNLYLIINYFKGGKLRFKKIKPEAFEANRFYTVINKKSGEIVPMEVNFNFDDPNLIILPLAFGKRQGREFIWNDLLSLETGSLKLANGRVIEKTLYNRRTRQDEPALFVALTFERREVLDSSNIKPMNLIGVDRGENIPAVIALTDPEGCPLSRFKDSLGNPTHILRIGESYKEKQRTIQAKKEVEQRRAGGYSRKYASKAKNLADDMVRNTARDLLYYAVTQDAMLIFENLSRGFGRQGKRTFMAERQYTRMEDWLTAKLAYEGLPSKTYLSKTLAQYTSKTCSNCGFTITSADYDRVLEKLKKTATGWMTTINGKELKVEGQITYYNRYKRQNVVKDLSVELDRLSEESVNNDISSWTKGRSGEALSLLKKRFSHRPVQEKFVCLNCGFETHADEQAALNIARSWLFLRSQEYKKYQTNKTTGNTDKRAFVETWQSFYRKKLKEVWKPAV

SEQ ID NO: 534 - protein, 978 aa, synthetic construct
  REGION 1..978: note = CasX variant
QEIKRINKIRRRLVKDSNTKKAGKTGPMKTLLVRVMTPDLRERLENLRKKPENIPQPISNTSRANLNKLLTDYTEMKKAILHVYWEEFQKDPVGLMSRVAQPASKKIDQNKLKPEMDEKGNLTTAGFACSQCGQPLFVYKLEQVSEKGKAYTNYFGRCNVAEHEKLILLAQLKPEKDSDEAVTYSLGKFGQRALDFYSIHVTKESTHPVKPLAQIAGNRYASGPVGKALSDACMGTIASFLSKYQDIIIEHQKVVKGNQKRLESLRELAGKENLEYPSVTLPPQPHTKEGVDAYNEVIARVRMWVNLNLWQKLKLSRDDAKPLLRLKGFPSFPLVERQANEVDWWDMVCNVKKLINEKKEDGKVFWQNLAGYKRQEALRPYLSSEEDRKKGKKFARYQLGDLLLHLEKKHGEDWGKVYDEAWERIDKKVEGLSKHIKLEEERRSEDAQSKAALTDWLRAKASFVIEGLKEADKDEKCRCELKLQKWYGDLRGKPFAIEAENSILDISGFSKQYNCAFIWQKDGVKKLNLYLIINYFKGGKLRFKKIKPEAFEANRFYTVINKKSGEIVPMEVNFNFDDPNLIILPLAFGKRQGREFIWNDLLSLETGSLKLANGRVIEKTLYNRRTRQDEPALFVALTFERREVLDSSNIKPMNLIGVDRGENIPAVIALTDPEGCPLSRFKDSLGNPTHILRIGESYKEKQRTIQAKKEVEQRRAGGYSRKYASKAKNLADDMVRNTARDLLYYAVTQDAMLIFENLSRGFGRQGKRTFMAERQYTRMEDWLTAKLAYEGLPSKTYLSKTLAQYTSKTCSNCGFTITSADYDRVLEKLKKTATGWMTTINGKELKVEGQITYYNRYKRQNVVKDLSVELDRLSEESVNNDISSWTKGRSGEALSLLKKRFSHRPVQEKFVCLNCGFETHADEQAALNIARSWLFLRSQEYKKYQTNKTTGNTDKRAFVETWQSFYRKKLKEVWKPAV

SEQ ID NO: 535 - protein, 978 aa, synthetic construct
  REGION 1..978: note = CasX variant
QEIKRINKIRRRLVKDSNTKKAGKTGPMKTLLVRVMTPDLRERLENLRKKPENIPQPISNTSRANLNKLLTDYTEMKKAILHVYWEEFQKDPVGLMSRVAQPASKKIDQNKLKPEMDEKGNLTTAGFACSQCGQPLFVYKLEQVSEKGKAYTNYFGRCNVAEHEKLILLAQLKPEKDSDEAVTYSLGKFGQRALDFYSIHVTKESTHPVKPLAQIAGNRYASGPVGKALSDACMGTIASFLSKYQDIIIEHQKVVKGNQKRLESLRELAGKENLEYPSVTLPPQPHTKEGVDAYNEVIARVRMWVNLNLWQKLKLSRDDAKPLLRLKGFPSFPLVERQANEVDWWDMVCNVKKLINEKKEDGKVFWQNLAGYKRQEALRPYLSSEEDRKKGKKFARYQLGDLLLHLEKKHGEDWGKVYDEAWERIDKKVEGLSKHIKLEEERRSEDAQSKAALTDWLRAKASFVIEGLKEADKDEFCRDELKLQKWYGDLRGKPFAIEAENSILDISGFSKQYNCAFIWQKDGVKKLNLYLIINYFKGGKLRFKKIKPEAFEANRFYTVINKKSGEIVPMEVNFNFDDPNLIILPLAFGKRQGREFIWNDLLSLETGSLKLANGRVIEKTLYNRRTRQDEPALFVALTFERREVLDSSNIKPMNLIGVDRGENIPAVIALTDPEGCPLSRFKDSLGNPTHILRIGESYKEKQRTIQAKKEVEQRRAGGYSRKYASKAKNLADDMVRNTARDLLYYAVTQDAMLIFENLSRGFGRQGKRTFMAERQYTRMEDWLTAKLAYEGLPSKTYLSKTLAQYTSKTCSNCGFTITSADYDRVLEKLKKTATGWMTTINGKELKVEGQITYYNRYKRQNVVKDLSVELDRLSEESVNNDISSWTKGRSGEALSLLKKRFSHRPVQEKFVCLNCGFETHADEQAALNIARSWLFLRSQEYKKYQTNKTTGNTDKRAFVETWQSFYRKKLKEVWKPAV

SEQ ID NO: 536 - protein, 979 aa, synthetic construct
  REGION 1..979: note = CasX variant
QEIKRINKIRRRLVKDSNTKKAGKTGPMKTLLVRVMTPDLRERLENLRKKPENIPQPISNTSRANLNKLLTDYTEMKKAILHVYWEEFQKDPVGLMSRVAQPASKKIDQNKLKPEMDEKGNLTTAGFACSQCGQPLFVYKLEQVSEKGKAYTNYFGRCNVAEHEKLILLAQLKPEKDSDEAVTYSLGKFGQRALDFYSIHVTKESTHPVKPLAQIAGNRYASGPVGKALSDACMGTIASFLSKYQDIIIEHQKVVKGNQKRLESLRELAGKENLEYPSVTLPPQPHTKEGVDAYNEVIARVRMWVNLNLWQKLKLSRDDAKPLLRLKGFPSFPLVERQANEVDWWDMVCNVKKLINEKKEDGKVFWQNLAGYKRQEALRPYLSSEEDRKKGKKFARYQLGDLLLHLEKKHGEDWGKVYDEAWERIDKKVEGLSKHIKLEEERRSEDAQSKAALTDWLRAKASFVIEGLKEADKDEFCRCVELKLQKWYGDLRGKPFAIEAENSILDISGFSKQYNCAFIWQKDGVKKLNLYLIINYFKGGKLRFKKIKPEAFEANRFYTVINKKSGEIVPMEVNFNFDDPNLIILPLAFGKRQGREFIWNDLLSLETGSLKLANGRVIEKTLYNRRTRQDEPALFVALTFERREVLDSSNIKPMNLIGVDRGENIPAVIALTDPEGCPLSRFKDSLGNPTHILRIGESYKEKQRTIQAKKEVEQRRAGGYSRKYASKAKNLADDMVRNTARDLLYYAVTQDAMLIFENLSRGFGRQGKRTFMAERQYTRMEDWLTAKLAYEGLPSKTYLSKTLAQYTSKTCSNCGFTITSADYDRVLEKLKKTATGWMTTINGKELKVEGQITYYNRYKRQNVVKDLSVELDRLSEESVNNDISSWTKGRSGEALSLLKKRFSHRPVQEKFVCLNCGFETHADEQAALNIARSWLFLRSQEYKKYQTNKTTGNTDKRAFVETWQSFYRKKLKEVWKPAV

SEQ ID NO: 537 - protein, 978 aa, synthetic construct
  REGION 1..978: note = CasX variant
QEIKRINKIRRRLVKDSNTKKAGKTGPMKTLLVRVMTPDLRERLENLRKKPENIPQPISNTSRANLNKLLTDYTEMKKAILHVYWEEFQKDPVGLMSRVAQPASKKIDQNKLKPEMDEKGNLTTAGFACSQCGQPLFVYKLEQVSEKGKAYTNYFGRCNVAEHEKLILLAQLKPEKDSDEAVTYSLGKFGQRALDFYSIHVTKESTHPVKPLAQIAGNRYASGPVGKALSDACMGTIASFLSKYQDIIIEHQKVVKGNQKRLESLRELAGKENLEYPSVTLPPQPHTKEGVDAYNEVIARVRMWVNLNLWQKLKLSRDDAKPLLRLKGFPSFPLVERQANEVDWWDMVCNVKKLINEKKEDGKVFWQNLAGYKRQEALRPYLSSEEDRKKGKKFARYQLGDLLLHLEKKHGEDWGKVYDEAWERIDKKVEGLSKHIKLEEERRSEDAQSKAALTDWLRAKASFVIEGLKEADKDEFCRCDLKLQKWYGDLRGKPFAIEAENSILDISGFSKQYNCAFIWQKDGVKKLNLYLIINYFKGGKLRFKKIKPEAFEANRFYTVINKKSGEIVPMEVNFNFDDPNLIILPLAFGKRQGREFIWNDLLSLETGSLKLANGRVIEKTLYNRRTRQDEPALFVALTFERREVLDSSNIKPMNLIGVDRGENIPAVIALTDPEGCPLSRFKDSLGNPTHILRIGESYKEKQRTIQAKKEVEQRRAGGYSRKYASKAKNLADDMVRNTARDLLYYAVTQDAMLIFENLSRGFGRQGKRTFMAERQYTRMEDWLTAKLAYEGLPSKTYLSKTLAQYTSKTCSNCGFTITSADYDRVLEKLKKTATGWMTTINGKELKVEGQITYYNRYKRQNVVKDLSVELDRLSEESVNNDISSWTKGRSGEALSLLKKRFSHRPVQEKFVCLNCGFETHADEQAALNIARSWLFLRSQEYKKYQTNKTTGNTDKRAFVETWQSFYRKKLKEVWKPAV

SEQ ID NO: 538 - protein, 978 aa, synthetic construct
  REGION 1..978: note = CasX variant
QEIKRINKIRRRLVKDSNTKKAGKTGPMKTLLVRVMTPDLRERLENLRKKPENIPQPISNTSRANLNKLLTDYTEMKKAILHVYWEEFQKDPVGLMSRVAQPASKKIDQNKLKPEMDEKGNLTTAGFACSQCGQPLFVYKLEQVSEKGKAYTNYFGRCNVAEHEKLILLAQLKPEKDSDEAVTYSLGKFGQRALDFYSIHVTKESTHPVKPLAQIAGNRYASGPVGKALSDACMGTIASFLSKYQDIIIEHQKVVKGNQKRLESLRELAGKENLEYPSVTLPPQPHTKEGVDAYNEVIARVRMWVNLNLWQKLKLSRDDAKPLLRLKGFPSFPLVERQANEVDWWDMVCNVKKLINEKKEDGKVFWQNLAGYKRQEALRPYLSSEEDRKKGKKFARYQLGDLLLHLEKKHGEDWGKVYDEAWERIDKKVEGLSKHIKLEEERRSEDAQSKAALTDWLRAKASFVIEGLKEADKDEFCRCERKLQKWYGDLRGKPFAIEAENSILDISGFSKQYNCAFIWQKDGVKKLNLYLIINYFKGGKLRFKKIKPEAFEANRFYTVINKKSGEIVPMEVNFNFDDPNLIILPLAFGKRQGREFIWNDLLSLETGSLKLANGRVIEKTLYNRRTRQDEPALFVALTFERREVLDSSNIKPMNLIGVDRGENIPAVIALTDPEGCPLSRFKDSLGNPTHILRIGESYKEKQRTIQAKKEVEQRRAGGYSRKYASKAKNLADDMVRNTARDLLYYAVTQDAMLIFENLSRGFGRQGKRTFMAERQYTRMEDWLTAKLAYEGLPSKTYLSKTLAQYTSKTCSNCGFTITSADYDRVLEKLKKTATGWMTTINGKELKVEGQITYYNRYKRQNVVKDLSVELDRLSEESVNNDISSWTKGRSGEALSLLKKRFSHRPVQEKFVCLNCGFETHADEQAALNIARSWLFLRSQEYKKYQTNKTTGNTDKRAFVETWQSFYRKKLKEVWKPAV

SEQ ID NO: 539 - protein, 978 aa, synthetic construct
  REGION 1..978: note = CasX variant
QEIKRINKIRRRLVKDSNTKKAGKTGPMKTLLVRVMTPDLRERLENLRKKPENIPQPISNTSRANLNKLLTDYTEMKKAILHVYWEEFQKDPVGLMSRVAQPASKKIDQNKLKPEMDEKGNLTTAGFACSQCGQPLFVYKLEQVSEKGKAYTNYFGRCNVAEHEKLILLAQLKPEKDSDEAVTYSLGKFGQRALDFYSIHVTKESTHPVKPLAQIAGNRYASGPVGKALSDACMGTIASFLSKYQDIIIEHQKVVKGNQKRLESLRELAGKENLEYPSVTLPPQPHTKEGVDAYNEVIARVRMWVNLNLWQKLKLSRDDAKPLLRLKGFPSFPLVERQANEVDWWDMVCNVKKLINEKKEDGKVFWQNLAGYKRQEALRPYLSSEEDRKKGKKFARYQLGDLLLHLEKKHGEDWGKVYDEAWERIDKKVEGLSKHIKLEEERRSEDAQSKAALTDWLRAKASFVIEGLKEADKDEFCRCELKHQKWYGDLRGKPFAIEAENSILDISGFSKQYNCAFIWQKDGVKKLNLYLIINYFKGGKLRFKKIKPEAFEANRFYTVINKKSGEIVPMEVNFNFDDPNLIILPLAFGKRQGREFIWNDLLSLETGSLKLANGRVIEKTLYNRRTRQDEPALFVALTFERREVLDSSNIKPMNLIGVDRGENIPAVIALTDPEGCPLSRFKDSLGNPTHILRIGESYKEKQRTIQAKKEVEQRRAGGYSRKYASKAKNLADDMVRNTARDLLYYAVTQDAMLIFENLSRGFGRQGKRTFMAERQYTRMEDWLTAKLAYEGLPSKTYLSKTLAQYTSKTCSNCGFTITSADYDRVLEKLKKTATGWMTTINGKELKVEGQITYYNRYKRQNVVKDLSVELDRLSEESVNNDISSWTKGRSGEALSLLKKRFSHRPVQEKFVCLNCGFETHADEQAALNIARSWLFLRSQEYKKYQTNKTTGNTDKRAFVETWQSFYRKKLKEVWKPAV

SEQ ID NO: 540 - protein, 978 aa, synthetic construct
  REGION 1..978: note = CasX variant
QEIKRINKIRRRLVKDSNTKKAGKTGPMKTLLVRVMTPDLRERLENLRKKPENIPQPISNTSRANLNKLLTDYTEMKKAILHVYWEEFQKDPVGLMSRVAQPASKKIDQNKLKPEMDEKGNLTTAGFACSQCGQPLFVYKLEQVSEKGKAYTNYFGRCNVAEHEKLILLAQLKPEKDSDEAVTYSLGKFGQRALDFYSIHVTKESTHPVKPLAQIAGNRYASGPVGKALSDACMGTIASFLSKYQDIIIEHQKVVKGNQKRLESLRELAGKENLEYPSVTLPPQPHTKEGVDAYNEVIARVRMWVNLNLWQKLKLSRDDAKPLLRLKGFPSFPLVERQANEVDWWDMVCNVKKLINEKKEDGKVFWQNLAGYKRQEALRPYLSSEEDRKKGKKFARYQLGDLLLHLEKKHGEDWGKVYDEAWERIDKKVEGLSKHIKLEEERRSEDAQSKAALTDWLRAKASFVIEGLKEADKDEFCRCELKLQPWYGDLRGKPFAIEAENSILDISGFSKQYNCAFIWQKDGVKKLNLYLIINYFKGGKLRFKKIKPEAFEANRFYTVINKKSGEIVPMEVNFNFDDPNLIILPLAFGKRQGREFIWNDLLSLETGSLKLANGRVIEKTLYNRRTRQDEPALFVALTFERREVLDSSNIKPMNLIGVDRGENIPAVIALTDPEGCPLSRFKDSLGNPTHILRIGESYKEKQRTIQAKKEVEQRRAGGYSRKYASKAKNLADDMVRNTARDLLYYAVTQDAMLIFENLSRGFGRQGKRTFMAERQYTRMEDWLTAKLAYEGLPSKTYLSKTLAQYTSKTCSNCGFTITSADYDRVLEKLKKTATGWMTTINGKELKVEGQITYYNRYKRQNVVKDLSVELDRLSEESVNNDISSWTKGRSGEALSLLKKRFSHRPVQEKFVCLNCGFETHADEQAALNIARSWLFLRSQEYKKYQTNKTTGNTDKRAFVETWQSFYRKKLKEVWKPAV

SEQ ID NO: 541 - protein, 978 aa, synthetic construct; identical to SEQ ID NO: 453
  REGION 1..978: note = CasX variant

SEQ ID NO: 542 - protein, 978 aa, synthetic construct
  REGION 1..978: note = CasX variant
QEIKRINKIRRRLVKDSNTKKAGKTGPMKTLLVRVMTPDLRERLENLRKKPENIPQPISNTSRANLNKLLTDYTEMKKAILHVYWEEFQKDPVGLMSRVAQPASKKIDQNKLKPEMDEKGNLTTAGFACSQCGQPLFVYKLEQVSEKGKAYTNYFGRCNVAEHEKLILLAQLKPEKDSDEAVTYSLGKFGQRALDFYSIHVTKESTHPVKPLAQIAGNRYASGPVGKALSDACMGTIASFLSKYQDIIIEHQKVVKGNQKRLESLRELAGKENLEYPSVTLPPQPHTKEGVDAYNEVIARVRMWVNLNLWQKLKLSRDDAKPLLRLKGFPSFPLVERQANEVDWWDMVCNVKKLINEKKEDGKVFWQNLAGYKRQEALRPYLSSEEDRKKGKKFARYQLGDLLLHLEKKHGEDWGKVYDEAWERIDKKVEGLSKHIKLEEERRSEDAQSKAALTDWLRAKASFVIEGLKEADKDEFCRCELKLQKWYGDLRGKPFAIEAENSILDISGFSKQYNCAFIWQKDGVKKLNLYLIINYFKGGKLRFKKIKPEAFEANRFYTVINKKSGEIVPMEVNFNFDDPNLIILPLAFGKRFGREFIWNDLLSLETGSLKLANGRVIEKTLYNRRTRQDEPALFVALTFERREVLDSSNIKPMNLIGVDRGENIPAVIALTDPEGCPLSRFKDSLGNPTHILRIGESYKEKQRTIQAKKEVEQRRAGGYSRKYASKAKNLADDMVRNTARDLLYYAVTQDAMLIFENLSRGFGRQGKRTFMAERQYTRMEDWLTAKLAYEGLPSKTYLSKTLAQYTSKTCSNCGFTITSADYDRVLEKLKKTATGWMTTINGKELKVEGQITYYNRYKRQNVVKDLSVELDRLSEESVNNDISSWTKGRSGEALSLLKKRFSHRPVQEKFVCLNCGFETHADEQAALNIARSWLFLRSQEYKKYQTNKTTGNTDKRAFVETWQSFYRKKLKEVWKPAV

SEQ ID NO: 543 - protein, 978 aa, synthetic construct
  REGION 1..978: note = CasX variant
QEIKRINKIRRRLVKDSNTKKAGKTGPMKTLLVRVMTPDLRERLENLRKKPENIPQPISNTSRANLNKLLTDYTEMKKAILHVYWEEFQKDPVGLMSRVAQPASKKIDQNKLKPEMDEKGNLTTAGFACSQCGQPLFVYKLEQVSEKGKAYTNYFGRCNVAEHEKLILLAQLKPEKDSDEAVTYSLGKFGQRALDFYSIHVTKESTHPVKPLAQIAGNRYASGPVGKALSDACMGTIASFLSKYQDIIIEHQKVVKGNQKRLESLRELAGKENLEYPSVTLPPQPHTKEGVDAYNEVIARVRMWVNLNLWQKLKLSRDDAKPLLRLKGFPSFPLVERQANEVDWWDMVCNVKKLINEKKEDGKVFWQNLAGYKRQEALRPYLSSEEDRKKGKKFARYQLGDLLLHLEKKHGEDWGKVYDEAWERIDKKVEGLSKHIKLEEERRSEDAQSKAALTDWLRAKASFVIEGLKEADKDEFCRCELKLQKWYGDLRGKPFAIEAENSILDISGFSKQYNCAFIWQKDGVKKLNLYLIINYFKGGKLRFKKIKPEAFEANRFYTVINKKSGEIVPMEVNFNFDDPNLIILPLAFGKRVGREFIWNDLLSLETGSLKLANGRVIEKTLYNRRTRQDEPALFVALTFERREVLDSSNIKPMNLIGVDRGENIPAVIALTDPEGCPLSRFKDSLGNPTHILRIGESYKEKQRTIQAKKEVEQRRAGGYSRKYASKAKNLADDMVRNTARDLLYYAVTQDAMLIFENLSRGFGRQGKRTFMAERQYTRMEDWLTAKLAYEGLPSKTYLSKTLAQYTSKTCSNCGFTITSADYDRVLEKLKKTATGWMTTINGKELKVEGQITYYNRYKRQNVVKDLSVELDRLSEESVNNDISSWTKGRSGEALSLLKKRFSHRPVQEKFVCLNCGFETHADEQAALNIARSWLFLRSQEYKKYQTNKTTGNTDKRAFVETWQSFYRKKLKEVWKPAV

SEQ ID NO: 544 - protein, 979 aa, synthetic construct
  REGION 1..979: note = CasX variant
QEIKRINKIRRRLVKDSNTKKAGKTGPMKTLLVRVMTPDLRERLENLRKKPENIPQPISNTSRANLNKLLTDYTEMKKAILHVYWEEFQKDPVGLMSRVAQPASKKIDQNKLKPEMDEKGNLTTAGFACSQCGQPLFVYKLEQVSEKGKAYTNYFGRCNVAEHEKLILLAQLKPEKDSDEAVTYSLGKFGQRALDFYSIHVTKESTHPVKPLAQIAGNRYASGPVGKALSDACMGTIASFLSKYQDIIIEHQKVVKGNQKRLESLRELAGKENLEYPSVTLPPQPHTKEGVDAYNEVIARVRMWVNLNLWQKLKLSRDDAKPLLRLKGFPSFPLVERQANEVDWWDMVCNVKKLINEKKEDGKVFWQNLAGYKRQEALRPYLSSEEDRKKGKKFARYQLGDLLLHLEKKHGEDWGKVYDEAWERIDKKVEGLSKHIKLEEERRSEDAQSKAALTDWLRAKASFVIEGLKEADKDEFCRCELKLQKWYGDLRGKPFAIEAENSILDISGFSKQYNCAFIWQKDGVKKLNLYLIINYFKGGKLRFKKIKPEAFEANRFYTVINKKSGEIVPMEVNFNFDDPNLIILPLAFGKRQGREFIWNDLLSLETGSLKLANGRVIEKTLYNRRTRQDEPALFVALTFERREVLDSSNIIKPMNLIGVDRGENIPAVIALTDPEGCPLSRFKDSLGNPTHILRIGESYKEKQRTIQAKKEVEQRRAGGYSRKYASKAKNLADDMVRNTARDLLYYAVTQDAMLIFENLSRGFGRQGKRTFMAERQYTRMEDWLTAKLAYEGLPSKTYLSKTLAQYTSKTCSNCGFTITSADYDRVLEKLKKTATGWMTTINGKELKVEGQITYYNRYKRQNVVKDLSVELDRLSEESVNNDISSWTKGRSGEALSLLKKRFSHRPVQEKFVCLNCGFETHADEQAALNIARSWLFLRSQEYKKYQTNKTTGNTDKRAFVETWQSFYRKKLKEVWKPAV

SEQ ID NO: 545 - protein, 979 aa, synthetic construct
  REGION 1..979: note = CasX variant
QEIKRINKIRRRLVKDSNTKKAGKTGPMKTLLVRVMTPDLRERLENLRKKPENIPQPISNTSRANLNKLLTDYTEMKKAILHVYWEEFQKDPVGLMSRVAQPASKKIDQNKLKPEMDEKGNLTTAGFACSQCGQPLFVYKLEQVSEKGKAYTNYFGRCNVAEHEKLILLAQLKPEKDSDEAVTYSLGKFGQRALDFYSIHVTKESTHPVKPLAQIAGNRYASGPVGKALSDACMGTIASFLSKYQDIIIEHQKVVKGNQKRLESLRELAGKENLEYPSVTLPPQPHTKEGVDAYNEVIARVRMWVNLNLWQKLKLSRDDAKPLLRLKGFPSFPLVERQANEVDWWDMVCNVKKLINEKKEDGKVFWQNLAGYKRQEALRPYLSSEEDRKKGKKFARYQLGDLLLHLEKKHGEDWGKVYDEAWERIDKKVEGLSKHIKLEEERRSEDAQSKAALTDWLRAKASFVIEGLKEADKDEFCRCELKLQKWYGDLRGKPFAIEAENSILDISGFSKQYNCAFIWQKDGVKKLNLYLIINYFKGGKLRFKKIKPEAFEANRFYTVINKKSGEIVPMEVNFNFDDPNLIILPLAFGKRQGREFIWNDLLSLETGSLKLANGRVIEKTLYNRRTRQDEPALFVALTFERREVLDSSNIKTPMNLIGVDRGENIPAVIALTDPEGCPLSRFKDSLGNPTHILRIGESYKEKQRTIQAKKEVEQRRAGGYSRKYASKAKNLADDMVRNTARDLLYYAVTQDAMLIFENLSRGFGRQGKRTFMAERQYTRMEDWLTAKLAYEGLPSKTYLSKTLAQYTSKTCSNCGFTITSADYDRVLEKLKKTATGWMTTINGKELKVEGQITYYNRYKRQNVVKDLSVELDRLSEESVNNDISSWTKGRSGEALSLLKKRFSHRPVQEKFVCLNCGFETHADEQAALNIARSWLFLRSQEYKKYQTNKTTGNTDKRAFVETWQSFYRKKLKEVWKPAV

SEQ ID NO: 546 - protein, 979 aa, synthetic construct
  REGION 1..979: note = CasX variant
QEIKRINKIRRRLVKDSNTKKAGKTGPMKTLLVRVMTPDLRERLENLRKKPENIPQPISNTSRANLNKLLTDYTEMKKAILHVYWEEFQKDPVGLMSRVAQPASKKIDQNKLKPEMDEKGNLTTAGFACSQCGQPLFVYKLEQVSEKGKAYTNYFGRCNVAEHEKLILLAQLKPEKDSDEAVTYSLGKFGQRALDFYSIHVTKESTHPVKPLAQIAGNRYASGPVGKALSDACMGTIASFLSKYQDIIIEHQKVVKGNQKRLESLRELAGKENLEYPSVTLPPQPHTKEGVDAYNEVIARVRMWVNLNLWQKLKLSRDDAKPLLRLKGFPSFPLVERQANEVDWWDMVCNVKKLINEKKEDGKVFWQNLAGYKRQEALRPYLSSEEDRKKGKKFARYQLGDLLLHLEKKHGEDWGKVYDEAWERIDKKVEGLSKHIKLEEERRSEDAQSKAALTDWLRAKASFVIEGLKEADKDEFCRCELKLQKWYGDLRGKPFAIEAENSILDISGFSKQYNCAFIWQKDGVKKLNLYLIINYFKGGKLRFKKIKPEAFEANRFYTVINKKSGEIVPMEVNFNFDDPNLIILPLAFGKRQGREFIWNDLLSLETGSLKLANGRVIEKTLYNRRTRQDEPALFVALTFERREVLDSSNIKNPMNLIGVDRGENIPAVIALTDPEGCPLSRFKDSLGNPTHILRIGESYKEKQRTIQAKKEVEQRRAGGYSRKYASKAKNLADDMVRNTARDLLYYAVTQDAMLIFENLSRGFGRQGKRTFMAERQYTRMEDWLTAKLAYEGLPSKTYLSKTLAQYTSKTCSNCGFTITSADYDRVLEKLKKTATGWMTTINGKELKVEGQITYYNRYKRQNVVKDLSVELDRLSEESVNNDISSWTKGRSGEALSLLKKRFSHRPVQEKFVCLNCGFETHADEQAALNIARSWLFLRSQEYKKYQTNKTTGNTDKRAFVETWQSFYRKKLKEVWKPAV

SEQ ID NO: 547 - protein, 979 aa, synthetic construct
  REGION 1..979: note = CasX variant
QEIKRINKIRRRLVKDSNTKKAGKTGPMKTLLVRVMTPDLRERLENLRKKPENIPQPISNTSRANLNKLLTDYTEMKKAILHVYWEEFQKDPVGLMSRVAQPASKKIDQNKLKPEMDEKGNLTTAGFACSQCGQPLFVYKLEQVSEKGKAYTNYFGRCNVAEHEKLILLAQLKPEKDSDEAVTYSLGKFGQRALDFYSIHVTKESTHPVKPLAQIAGNRYASGPVGKALSDACMGTIASFLSKYQDIIIEHQKVVKGNQKRLESLRELAGKENLEYPSVTLPPQPHTKEGVDAYNEVIARVRMWVNLNLWQKLKLSRDDAKPLLRLKGFPSFPLVERQANEVDWWDMVCNVKKLINEKKEDGKVFWQNLAGYKRQEALRPYLSSEEDRKKGKKFARYQLGDLLLHLEKKHGEDWGKVYDEAWERIDKKVEGLSKHIKLEEERRSEDAQSKAALTDWLRAKASFVIEGLKEADKDEFCRCELKLQKWYGDLRGKPFAIEAENSILDISGFSKQYNCAFIWQKDGVKKLNLYLIINYFKGGKLRFKKIKPEAFEANRFYTVINKKSGEIVPMEVNFNFDDPNLIILPLAFGKRQGREFIWNDLLSLETGSLKLANGRVIEKTLYNRRTRQDEPALFVALTFERREVLDSSNIKPRMNLIGVDRGENIPAVIALTDPEGCPLSRFKDSLGNPTHILRIGESYKEKQRTIQAKKEVEQRRAGGYSRKYASKAKNLADDMVRNTARDLLYYAVTQDAMLIFENLSRGFGRQGKRTFMAERQYTRMEDWLTAKLAYEGLPSKTYLSKTLAQYTSKTCSNCGFTITSADYDRVLEKLKKTATGWMTTINGKELKVEGQITYYNRYKRQNVVKDLSVELDRLSEESVNNDISSWTKGRSGEALSLLKKRFSHRPVQEKFVCLNCGFETHADEQAALNIARSWLFLRSQEYKKYQTNKTTGNTDKRAFVETWQSFYRKKLKEVWKPAV

SEQ ID NO: 548 - protein, 979 aa, synthetic construct
  REGION 1..979: note = CasX variant
QEIKRINKIRRRLVKDSNTKKAGKTGPMKTLLVRVMTPDLRERLENLRKKPENIPQPISNTSRANLNKLLTDYTEMKKAILHVYWEEFQKDPVGLMSRVAQPASKKIDQNKLKPEMDEKGNLTTAGFACSQCGQPLFVYKLEQVSEKGKAYTNYFGRCNVAEHEKLILLAQLKPEKDSDEAVTYSLGKFGQRALDFYSIHVTKESTHPVKPLAQIAGNRYASGPVGKALSDACMGTIASFLSKYQDIIIEHQKVVKGNQKRLESLRELAGKENLEYPSVTLPPQPHTKEGVDAYNEVIARVRMWVNLNLWQKLKLSRDDAKPLLRLKGFPSFPLVERQANEVDWWDMVCNVKKLINEKKEDGKVFWQNLAGYKRQEALRPYLSSEEDRKKGKKFARYQLGDLLLHLEKKHGEDWGKVYDEAWERIDKKVEGLSKHIKLEEERRSEDAQSKAALTDWLRAKASFVIEGLKEADKDEFCRCELKLQKWYGDLRGKPFAIEAENSILDISGFSKQYNCAFIWQKDGVKKLNLYLIINYFKGGKLRFKKIKPEAFEANRFYTVINKKSGEIVPMEVNFNFDDPNLIILPLAFGKRQGREFIWNDLLSLETGSLKLANGRVIEKTLYNRRTRQDEPALFVALTFERREVLDSSNIKPMSNLIGVDRGENIPAVIALTDPEGCPLSRFKDSLGNPTHILRIGESYKEKQRTIQAKKEVEQRRAGGYSRKYASKAKNLADDMVRNTARDLLYYAVTQDAMLIFENLSRGFGRQGKRTFMAERQYTRMEDWLTAKLAYEGLPSKTYLSKTLAQYTSKTCSNCGFTITSADYDRVLEKLKKTATGWMTTINGKELKVEGQITYYNRYKRQNVVKDLSVELDRLSEESVNNDISSWTKGRSGEALSLLKKRFSHRPVQEKFVCLNCGFETHADEQAALNIARSWLFLRSQEYKKYQTNKTTGNTDKRAFVETWQSFYRKKLKEVWKPAV

SEQ ID NO: 549 - protein, 978 aa, synthetic construct
  REGION 1..978: note = CasX variant
QEIKRINKIRRRLVKDSNTKKAGKTGPMKTLLVRVMTPDLRERLENLRKKPENIPQPISNTSRANLNKLLTDYTEMKKAILHVYWEEFQKDPVGLMSRVAQPASKKIDQNKLKPEMDEKGNLTTAGFACSQCGQPLFVYKLEQVSEKGKAYTNYFGRCNVAEHEKLILLAQLKPEKDSDEAVTYSLGKFGQRALDFYSIHVTKESTHPVKPLAQIAGNRYASGPVGKALSDACMGTIASFLSKYQDIIIEHQKVVKGNQKRLESLRELAGKENLEYPSVTLPPQPHTKEGVDAYNEVIARVRMWVNLNLWQKLKLSRDDAKPLLRLKGFPSFPLVERQANEVDWWDMVCNVKKLINEKKEDGKVFWQNLAGYKRQEALRPYLSSEEDRKKGKKFARYQLGDLLLHLEKKHGEDWGKVYDEAWERIDKKVEGLSKHIKLEEERRSEDAQSKAALTDWLRAKASFVIEGLKEADKDEFCRCELKLQKWYGDLRGKPFAIEAENSILDISGFSKQYNCAFIWQKDGVKKLNLYLIINYFKGGKLRFKKIKPEAFEANRFYTVINKKSGEIVPMEVNFNFDDPNLIILPLAFGKRQGREFIWNDLLSLETGSLKLANGRVIEKTLYNRRTRQDEPALFVALTFERREVLDSSNIKPMNLIGVDRGENIPAVIALTDPEGCPLSRFKDSLGNPTHILRIWESYKEKQRTIQAKKEVEQRRAGGYSRKYASKAKNLADDMVRNTARDLLYYAVTQDAMLIFENLSRGFGRQGKRTFMAERQYTRMEDWLTAKLAYEGLPSKTYLSKTLAQYTSKTCSNCGFTITSADYDRVLEKLKKTATGWMTTINGKELKVEGQITYYNRYKRQNVVKDLSVELDRLSEESVNNDISSWTKGRSGEALSLLKKRFSHRPVQEKFVCLNCGFETHADEQAALNIARSWLFLRSQEYKKYQTNKTTGNTDKRAFVETWQSFYRKKLKEVWKPAV

SEQ ID NO: 550 - protein, 978 aa, synthetic construct
  REGION 1..978: note = CasX variant
QEIKRINKIRRRLVKDSNTKKAGKTGPMKTLLVRVMTPDLRERLENLRKKPENIPQPISNTSRANLNKLLTDYTEMKKAILHVYWEEFQKDPVGLMSRVAQPASKKIDQNKLKPEMDEKGNLTTAGFACSQCGQPLFVYKLEQVSEKGKAYTNYFGRCNVAEHEKLILLAQLKPEKDSDEAVTYSLGKFGQRALDFYSIHVTKESTHPVKPLAQIAGNRYASGPVGKALSDACMGTIASFLSKYQDIIIEHQKVVKGNQKRLESLRELAGKENLEYPSVTLPPQPHTKEGVDAYNEVIARVRMWVNLNLWQKLKLSRDDAKPLLRLKGFPSFPLVERQANEVDWWDMVCNVKKLINEKKEDGKVFWQNLAGYKRQEALRPYLSSEEDRKKGKKFARYQLGDLLLHLEKKHGEDWGKVYDEAWERIDKKVEGLSKHIKLEEERRSEDAQSKAALTDWLRAKASFVIEGLKEADKDEFCRCELKLQKWYGDLRGKPFAIEAENSILDISGFSKQYNCAFIWQKDGVKKLNLYLIINYFKGGKLRFKKIKPEAFEANRFYTVINKKSGEIVPMEVNFNFDDPNLIILPLAFGKRQGREFIWNDLLSLETGSLKLANGRVIEKTLYNRRTRQDEPALFVALTFERREVLDSSNIKPMNLIGVDRGENIPAVIALTDPEGCPLSRFKDSLGNPTHILRIRESYKEKQRTIQAKKEVEQRRAGGYSRKYASKAKNLADDMVRNTARDLLYYAVTQDAMLIFENLSRGFGRQGKRTFMAERQYTRMEDWLTAKLAYEGLPSKTYLSKTLAQYTSKTCSNCGFTITSADYDRVLEKLKKTATGWMTTINGKELKVEGQITYYNRYKRQNVVKDLSVELDRLSEESVNNDISSWTKGRSGEALSLLKKRFSHRPVQEKFVCLNCGFETHADEQAALNIARSWLFLRSQEYKKYQTNKTTGNTDKRAFVETWQSFYRKKLKEVWKPAV

SEQ ID NO: 551 - protein, 978 aa, synthetic construct
  REGION 1..978: note = CasX variant
QEIKRINKIRRRLVKDSNTKKAGKTGPMKTLLVRVMTPDLRERLENLRKKPENIPQPISNTSRANLNKLLTDYTEMKKAILHVYWEEFQKDPVGLMSRVAQPASKKIDQNKLKPEMDEKGNLTTAGFACSQCGQPLFVYKLEQVSEKGKAYTNYFGRCNVAEHEKLILLAQLKPEKDSDEAVTYSLGKFGQRALDFYSIHVTKESTHPVKPLAQIAGNRYASGPVGKALSDACMGTIASFLSKYQDIIIEHQKVVKGNQKRLESLRELAGKENLEYPSVTLPPQPHTKEGVDAYNEVIARVRMWVNLNLWQKLKLSRDDAKPLLRLKGFPSFPLVERQANEVDWWDMVCNVKKLINEKKEDGKVFWQNLAGYKRQEALRPYLSSEEDRKKGKKFARYQLGDLLLHLEKKHGEDWGKVYDEAWERIDKKVEGLSKHIKLEEERRSEDAQSKAALTDWLRAKASFVIEGLKEADKDEFCRCELKLQKWYGDLRGKPFAIEAENSILDISGFSKQYNCAFIWQKDGVKKLNLYLIINYFKGGKLRFKKIKPEAFEANRFYTVINKKSGEIVPMEVNFNFDDPNLIILPLAFGKRQGREFIWNDLLSLETGSLKLANGRVIEKTLYNRRTRQDEPALFVALTFERREVLDSSNIKPMNLIGVDRGENIPAVIALTDPEGCPLSRFKDSLGNPTHILRIGESYKEKQRTIQASKEVEQRRAGGYSRKYASKAKNLADDMVRNTARDLLYYAVTQDAMLIFENLSRGFGRQGKRTFMAERQYTRMEDWLTAKLAYEGLPSKTYLSKTLAQYTSKTCSNCGFTITSADYDRVLEKLKKTATGWMTTINGKELKVEGQITYYNRYKRQNVVKDLSVELDRLSEESVNNDISSWTKGRSGEALSLLKKRFSHRPVQEKFVCLNCGFETHADEQAALNIARSWLFLRSQEYKKYQTNKTTGNTDKRAFVETWQSFYRKKLKEVWKPAV

SEQ ID NO: 552 - protein, 978 aa, synthetic construct
  REGION 1..978: note = CasX variant
QEIKRINKIRRRLVKDSNTKKAGKTGPMKTLLVRVMTPDLRERLENLRKKPENIPQPISNTSRANLNKLLTDYTEMKKAILHVYWEEFQKDPVGLMSRVAQPASKKIDQNKLKPEMDEKGNLTTAGFACSQCGQPLFVYKLEQVSEKGKAYTNYFGRCNVAEHEKLILLAQLKPEKDSDEAVTYSLGKFGQRALDFYSIHVTKESTHPVKPLAQIAGNRYASGPVGKALSDACMGTIASFLSKYQDIIIEHQKVVKGNQKRLESLRELAGKENLEYPSVTLPPQPHTKEGVDAYNEVIARVRMWVNLNLWQKLKLSRDDAKPLLRLKGFPSFPLVERQANEVDWWDMVCNVKKLINEKKEDGKVFWQNLAGYKRQEALRPYLSSEEDRKKGKKFARYQLGDLLLHLEKKHGEDWGKVYDEAWERIDKKVEGLSKHIKLEEERRSEDAQSKAALTDWLRAKASFVIEGLKEADKDEFCRCELKLQKWYGDLRGKPFAIEAENSILDISGFSKQYNCAFIWQKDGVKKLNLYLIINYFKGGKLRFKKIKPEAFEANRFYTVINKKSGEIVPMEVNFNFDDPNLIILPLAFGKRQGREFIWNDLLSLETGSLKLANGRVIEKTLYNRRTRQDEPALFVALTFERREVLDSSNIKPMNLIGVDRGENIPAVIALTDPEGCPLSRFKDSLGNPTHILRIGESYKEKQRTIQAKKEVEQRRAGGYSRKYASKAKNLADDMVHNTARDLLYYAVTQDAMLIFENLSRGFGRQGKRTFMAERQYTRMEDWLTAKLAYEGLPSKTYLSKTLAQYTSKTCSNCGFTITSADYDRVLEKLKKTATGWMTTINGKELKVEGQITYYNRYKRQNVVKDLSVELDRLSEESVNNDISSWTKGRSGEALSLLKKRFSHRPVQEKFVCLNCGFETHADEQAALNIARSWLFLRSQEYKKYQTNKTTGNTDKRAFVETWQSFYRKKLKEVWKPAV

SEQ ID NO: 553 - protein, 978 aa, synthetic construct
  REGION 1..978: note = CasX variant
QEIKRINKIRRRLVKDSNTKKAGKTGPMKTLLVRVMTPDLRERLENLRKKPENIPQPISNTSRANLNKLLTDYTEMKKAILHVYWEEFQKDPVGLMSRVAQPASKKIDQNKLKPEMDEKGNLTTAGFACSQCGQPLFVYKLEQVSEKGKAYTNYFGRCNVAEHEKLILLAQLKPEKDSDEAVTYSLGKFGQRALDFYSIHVTKESTHPVKPLAQIAGNRYASGPVGKALSDACMGTIASFLSKYQDIIIEHQKVVKGNQKRLESLRELAGKENLEYPSVTLPPQPHTKEGVDAYNEVIARVRMWVNLNLWQKLKLSRDDAKPLLRLKGFPSFPLVERQANEVDWWDMVCNVKKLINEKKEDGKVFWQNLAGYKRQEALRPYLSSEEDRKKGKKFARYQLGDLLLHLEKKHGEDWGKVYDEAWERIDKKVEGLSKHIKLEEERRSEDAQSKAALTDWLRAKASFVIEGLKEADKDEFCRCELKLQKWYGDLRGKPFAIEAENSILDISGFSKQYNCAFIWQKDGVKKLNLYLIINYFKGGKLRFKKIKPEAFEANRFYTVINKKSGEIVPMEVNFNFDDPNLIILPLAFGKRQGREFIWNDLLSLETGSLKLANGRVIEKTLYNRRTRQDEPALFVALTFERREVLDSSNIKPMNLIGVDRGENIPAVIALTDPEGCPLSRFKDSLGNPTHILRIGESYKEKQRTIQAKKEVEQRRAGGYSRKYASKAKNLADDMVRNTARDLLYYAVTQDAMLIFENLSRGFGRQGKRTFSAERQYTRMEDWLTAKLAYEGLPSKTYLSKTLAQYTSKTCSNCGFTITSADYDRVLEKLKKTATGWMTTINGKELKVEGQITYYNRYKRQNVVKDLSVELDRLSEESVNNDISSWTKGRSGEALSLLKKRFSHRPVQEKFVCLNCGFETHADEQAALNIARSWLFLRSQEYKKYQTNKTTGNTDKRAFVETWQSFYRKKLKEVWKPAV

SEQ ID NO: 554 - protein, 978 aa, synthetic construct
  REGION 1..978: note = CasX variant
QEIKRINKIRRRLVKDSNTKKAGKTGPMKTLLVRVMTPDLRERLENLRKKPENIPQPISNTSRANLNKLLTDYTEMKKAILHVYWEEFQKDPVGLMSRVAQPASKKIDQNKLKPEMDEKGNLTTAGFACSQCGQPLFVYKLEQVSEKGKAYTNYFGRCNVAEHEKLILLAQLKPEKDSDEAVTYSLGKFGQRALDFYSIHVTKESTHPVKPLAQIAGNRYASGPVGKALSDACMGTIASFLSKYQDIIIEHQKVVKGNQKRLESLRELAGKENLEYPSVTLPPQPHTKEGVDAYNEVIARVRMWVNLNLWQKLKLSRDDAKPLLRLKGFPSFPLVERQANEVDWWDMVCNVKKLINEKKEDGKVFWQNLAGYKRQEALRPYLSSEEDRKKGKKFARYQLGDLLLHLEKKHGEDWGKVYDEAWERIDKKVEGLSKHIKLEEERRSEDAQSKAALTDWLRAKASFVIEGLKEADKDEFCRCELKLQKWYGDLRGKPFAIEAENSILDISGFSKQYNCAFIWQKDGVKKLNLYLIINYFKGGKLRFKKIKPEAFEANRFYTVINKKSGEIVPMEVNFNFDDPNLIILPLAFGKRQGREFIWNDLLSLETGSLKLANGRVIEKTLYNRRTRQDEPALFVALTFERREVLDSSNIKPMNLIGVDRGENIPAVIALTDPEGCPLSRFKDSLGNPTHILRIGESYKEKQRTIQAKKEVEQRRAGGYSRKYASKAKNLADDMVRNTARDLLYYAVTQDAMLIFENLSRGFGRQGKRTFAAERQYTRMEDWLTAKLAYEGLPSKTYLSKTLAQYTSKTCSNCGFTITSADYDRVLEKLKKTATGWMTTINGKELKVEGQITYYNRYKRQNVVKDLSVELDRLSEESVNNDISSWTKGRSGEALSLLKKRFSHRPVQEKFVCLNCGFETHADEQAALNIARSWLFLRSQEYKKYQTNKTTGNTDKRAFVETWQSFYRKKLKEVWKPAV

SEQ ID NO: 555 - protein, 978 aa, synthetic construct
  REGION 1..978: note = CasX variant
QEIKRINKIRRRLVKDSNTKKAGKTGPMKTLLVRVMTPDLRERLENLRKKPENIPQPISNTSRANLNKLLTDYTEMKKAILHVYWEEFQKDPVGLMSRVAQPASKKIDQNKLKPEMDEKGNLTTAGFACSQCGQPLFVYKLEQVSEKGKAYTNYFGRCNVAEHEKLILLAQLKPEKDSDEAVTYSLGKFGQRALDFYSIHVTKESTHPVKPLAQIAGNRYASGPVGKALSDACMGTIASFLSKYQDIIIEHQKVVKGNQKRLESLRELAGKENLEYPSVTLPPQPHTKEGVDAYNEVIARVRMWVNLNLWQKLKLSRDDAKPLLRLKGFPSFPLVERQANEVDWWDMVCNVKKLINEKKEDGKVFWQNLAGYKRQEALRPYLSSEEDRKKGKKFARYQLGDLLLHLEKKHGEDWGKVYDEAWERIDKKVEGLSKHIKLEEERRSEDAQSKAALTDWLRAKASFVIEGLKEADKDEFCRCELKLQKWYGDLRGKPFAIEAENSILDISGFSKQYNCAFIWQKDGVKKLNLYLIINYFKGGKLRFKKIKPEAFEANRFYTVINKKSGEIVPMEVNFNFDDPNLIILPLAFGKRQGREFIWNDLLSLETGSLKLANGRVIEKTLYNRRTRQDEPALFVALTFERREVLDSSNIKPMNLIGVDRGENIPAVIALTDPEGCPLSRFKDSLGNPTHILRIGESYKEKQRTIQAKKEVEQRRAGGYSRKYASKAKNLADDMVRNTARDLLYYAVTQDAMLIFENLSRGFGRQGKRTFMAERQYTRMEDWLTAKLAYEGLPSKTYLSKTLAQYTSKTCSNCGFTITSADYDRVLEKLKKTATGWMTTINGKELKVEGQITYYNRYKRQNVVKDLSVELDRLSEESVNNDISSWDKGRSGEALSLLKKRFSHRPVQEKFVCLNCGFETHADEQAALNIARSWLFLRSQEYKKYQTNKTTGNTDKRAFVETWQSFYRKKLKEVWKPAV

SEQ ID NO: 556 - protein, 979 aa, synthetic construct
  REGION 1..979: note = CasX variant
QEIKRINKIRRRLVKDSNTKKAGKTGPMKTLLVRVMTPDLRERLENLRKKPENIPQPISNTSRANLNKLLTDYTEMKKAILHVYWEEFQKDPVGLMSRVAQPASKKIDQNKLKPEMDEKGNLTTAGFACSQCGQPLFVYKLEQVSEKGKAYTNYFGRCNVAEHEKLILLAQLKPEKDSDEAVTYSLGKFGQRALDFYSIHVTKESTHPVKPLAQIAGNRYASGPVGKALSDACMGTIASFLSKYQDIIIEHQKVVKGNQKRLESLRELAGKENLEYPSVTLPPQPHTKEGVDAYNEVIARVRMWVNLNLWQKLKLSRDDAKPLLRLKGFPSFPLVERQANEVDWWDMVCNVKKLINEKKEDGKVFWQNLAGYKRQEALRPYLSSEEDRKKGKKFARYQLGDLLLHLEKKHGEDWGKVYDEAWERIDKKVEGLSKHIKLEEERRSEDAQSKAALTDWLRAKASFVIEGLKEADKDEFCRCELKLQKWYGDLRGKPFAIEAENSILDISGFSKQYNCAFIWQKDGVKKLNLYLIINYFKGGKLRFKKIKPEAFEANRFYTVINKKSGEIVPMEVNFNFDDPNLIILPLAFGKRQGREFIWNDLLSLETGSLKLANGRVIEKTLYNRRTRQDEPALFVALTFERREVLDSSNIKPMNLIGVDRGENIPAVIALTDPEGCPLSRFKDSLGNPTHILRIGESYKEKQRTIQAKKEVEQRRAGGYSRKYASKAKNLADDMVRNTARDLLYYAVTQDAMLIFENLSRGFGRQGKRTFMAERQYTRMEDWLTAKLAYEGLPSKTYLSKTLAQYTSKTCSNCGFTITSADYDRVLEKLKKTATGWMTTINGKELKVEGQITYYNRYKRQNVVKDLSVELDRLSEESVNNDISSWTKGRSGNEALSLLKKRFSHRPVQEKFVCLNCGFETHADEQAALNIARSWLFLRSQEYKKYQTNKTTGNTDKRAFVETWQSFYRKKLKEVWKPAV

SEQ ID NO: 557 - protein, 978 aa, synthetic construct
  REGION 1..978: note = CasX variant
QEIKRINKIRRRLVKDSNTKKAGKTGPMKTLLVRVMTPDLRERLENLRKKPENIPQPISNTSRANLNKLLTDYTEMKKAILHVYWEEFQKDPVGLMSRVAQPASKKIDQNKLKPEMDEKGNLTTAGFACSQCGQPLFVYKLEQVSEKGKAYTNYFGRCNVAEHEKLILLAQLKPEKDSDEAVTYSLGKFGQRALDFYSIHVTKESTHPVKPLAQIAGNRYASGPVGKALSDACMGTIASFLSKYQDIIIEHQKVVKGNQKRLESLRELAGKENLEYPSVTLPPQPHTKEGVDAYNEVIARVRMWVNLNLWQKLKLSRDDAKPLLRLKGFPSFPLVERQANEVDWWDMVCNVKKLINEKKEDGKVFWQNLAGYKRQEALRPYLSSEEDRKKGKKFARYQLGDLLLHLEKKHGEDWGKVYDEAWERIDKKVEGLSKHIKLEEERRSEDAQSKAALTDWLRAKASFVIEGLKEADKDEFCRCELKLQKWYGDLRGKPFAIEAENSILDISGFSKQYNCAFIWQKDGVKKLNLYLIINYFKGGKLRFKKIKPEAFEANRFYTVINKKSGEIVPMEVNFNFDDPNLIILPLAFGKRQGREFIWNDLLSLETGSLKLANGRVIEKTLYNRRTRQDEPALFVALTFERREVLDSSNIKPMNLIGVDRGENIPAVIALTDPEGCPLSRFKDSLGNPTHILRIGESYKEKQRTIQAKKEVEQRRAGGYSRKYASKAKNLADDMVRNTARDLLYYAVTQDAMLIFENLSRGFGRQGKRTFMAERQYTRMEDWLTAKLAYEGLPSKTYLSKTLAQYTSKTCSNCGFTITSADYDRVLEKLKKTATGWMTTINGKELKVEGQITYYNRYKRQNVVKDLSVELDRLSEESVNNDISSWTKGRSGEALSLLKKRFSHRPVQEKFVCLNCGFETHADEQAALNIARVWLFLRSQEYKKYQTNKTTGNTDKRAFVETWQSFYRKKLKEVWKPAV

SEQ ID NO: 558 - protein, 978 aa, synthetic construct
  REGION 1..978: note = CasX variant
QEIKRINKIRRRLVKDSNTKKAGKTGPMKTLLVRVMTPDLRERLENLRKKPENIPQPISNTSRANLNKLLTDYTEMKKAILHVYWEEFQKDPVGLMSRVAQPASKKIDQNKLKPEMDEKGNLTTAGFACSQCGQPLFVYKLEQVSEKGKAYTNYFGRCNVAEHEKLILLAQLKPEKDSDEAVTYSLGKFGQRALDFYSIHVTKESTHPVKPLAQIAGNRYASGPVGKALSDACMGTIASFLSKYQDIIIEHQKVVKGNQKRLESLRELAGKENLEYPSVTLPPQPHTKEGVDAYNEVIARVRMWVNLNLWQKLKLSRDDAKPLLRLKGFPSFPLVERQANEVDWWDMVCNVKKLINEKKEDGKVFWQNLAGYKRQEALRPYLSSEEDRKKGKKFARYQLGDLLLHLEKKHGEDWGKVYDEAWERIDKKVEGLSKHIKLEEERRSEDAQSKAALTDWLRAKASFVIEGLKEADKDEFCRCELKLQKWYGDLRGKPFAIEAENSILDISGFSKQYNCAFIWQKDGVKKLNLYLIINYFKGGKLRFKKIKPEAFEANRFYTVINKKSGEIVPMEVNFNFDDPNLIILPLAFGKRQGREFIWNDLLSLETGSLKLANGRVIEKTLYNRRTRQDEPALFVALTFERREVLDSSNIKPMNLIGVDRGENIPAVIALTDPEGCPLSRFKDSLGNPTHILRIGESYKEKQRTIQAKKEVEQRRAGGYSRKYASKAKNLADDMVRNTARDLLYYAVTQDAMLIFENLSRGFGRQGKRTFMAERQYTRMEDWLTAKLAYEGLPSKTYLSKTLAQYTSKTCSNCGFTITSADYDRVLEKLKKTATGWMTTINGKELKVEGQITYYNRYKRQNVVKDLSVELDRLSEESVNNDISSWTKGRSGEALSLLKKRFSHRPVQEKFVCLNCGFETHADEQAALNIARSWLFLRSQEYKKYQTNKTTINTDKRAFVETWQSFYRKKLKEVWKPAV

SEQ ID NO: 559 - protein, 977 aa, synthetic construct; identical to SEQ ID NO: 97
  REGION 1..977: note = CasX variant

SEQ ID NO: 560 - protein, 977 aa, synthetic construct; identical to SEQ ID NO: 98
  REGION 1..977: note = CasX variant

SEQ ID NO: 561 - protein, 977 aa, synthetic construct; identical to SEQ ID NO: 99
  REGION 1..977: note = CasX variant

SEQ ID NO: 562 - protein, 977 aa, synthetic construct; identical to SEQ ID NO: 100
  REGION 1..977: note = CasX variant

SEQ ID NO: 563 - protein, 977 aa, synthetic construct; identical to SEQ ID NO: 101
  REGION 1..977: note = CasX variant

SEQ ID NO: 564 - protein, 978 aa, synthetic construct
  REGION 1..978: note = CasX variant
QEIKRINKIRRRLVKDSNTKKAGKTGPMKTLLVRVMTPDLRERLENLRKKPENIPQPISNTSRANLNKLLTDYTEMKKAILHVYWEEFQKDPVGLMSRVAQPASKKIDQNKLKPEMDEKGNLTTAGFACSQCGQPLFVYKLEQVSEKGKAYTNYFGRCNVAEHEKLILLAQLKPEKDSDEAVTYSLGKFGQRALDFYSIHVTKESTHPVKPLAQIAGNRYASGPVGKALSDACMGTIASFLSKYQDIIIEHQKVVKGNQKRLESLRELAGKENLEYPSVTLPPQPHTKEGVDAYNEVIARVRMWVNLNLWQKLKLSRDDAKPLLRLKGFPSFPLVERQANEVDWWDMVCNVKKLINEKKEDGKVFWQNLAGYKRQEALRPYLSSEEDRKKGKKFARYQLGDLLLHLEKKHGEDWGKVYDEAWERIDKKVEGLSKHIKLEEERRSEDAQSKAALTDWLRAKASFVIEGLKEADKDEFCRCELKLQKWYGDLRGKPFAIEAENSILDISGFSKQYNCAFIWQKDGVKKLNLYLIINYFKGGKLRFKKIKPEAFEANRFYTVINKKSGEIVPMEVNFNFDDPNLIILPLAFGKRQGREFIWNDLLSLETGSLKLANGRVIEKTLYNRRTRQDEPALFVALTFEDREVLDSSNIKPMNLIGVDRGENIPAVIALTDPEGCPLSRFKDSLGNPTHILRIGESYKEKQRTIQAKKEVEQRRAGGYSRKYASKAKNLADDMVRNTARDLLYYAVTQDAMLIFENLSRGFGRQGKRTFMAERQYTRMEDWLTAKLAYEGLPSKTYLSKTLAQYTSKTCSNCGFTITSADYDRVLEKLKKTATGWMTTINGKELKVEGQITYYNRYKRQNVVKDLSVELDRLSEESVNNDISSWTKGRSGEALSLLKKRFSHRPVQEKFVCLNCGFETHADEQAALNIARSWLFLRSQEYKKYQTNKTTGNTDKRAFVETWQSFYRKKLKEVWKPAV

SEQ ID NO: 565 - protein, 979 aa, synthetic construct
  REGION 1..979: note = CasX variant
QEIKRINKIRRRLVKDSNTKKAGKTGPMKTLLVRVMTPDLRERLENLRKKPENIPQPISNTSRANLNKLLTDYTEMKKAILHVYWEEFQKDPVGLMSRVAQPASKKIDQNKLKPEMDEKGNLTTAGFACSQCGQPLFVYKLEQVSEKGKAYTNYFGRCNVAEHEKLILLAQLKPEKDSDEAVTYSLGKFGQRALDFYSIHVTKESTHPVKPLAQIAGNRYASGPVGKALSDACMGTIASFLSKYQDIIIEHQKVVKGNQKRLESLRELAGKENLEYPSVTLPPQPHTKEGVDAYNEVIARVRMWVNLNLWQKLKLSRDDAKPLLRLKGFPSFPLVERQANEVDWWDMVCNVKKLINEKKEDGKVFWQNLAGYKRQEALRPYLSSEEDRKKGKKFARYQLGDLLLHLEKKHGEDWGKVYDEAWERIDKKVEGLSKHIKLEEERRSEDAQSKAALTDWLRAKASFVIEGLKEADKDEFCRCELKLQKWYGDLRGKHPFAIEAENSILDISGFSKQYNCAFIWQKDGVKKLNLYLIINYFKGGKLRFKKIKPEAFEANRFYTVINKKSGEIVPMEVNFNFDDPNLIILPLAFGKRQGREFIWNDLLSLETGSLKLANGRVIEKTLYNRRTRQDEPALFVALTFERREVLDSSNIKPMNLIGVDRGENIPAVIALTDPEGCPLSRFKDSLGNPTHILRIGESYKEKQRTIQAKKEVEQRRAGGYSRKYASKAKNLADDMVRNTARDLLYYAVTQDAMLIFENLSRGFGRQGKRTFMAERQYTRMEDWLTAKLAYEGLPSKTYLSKTLAQYTSKTCSNCGFTITSADYDRVLEKLKKTATGWMTTINGKELKVEGQITYYNRYKRQNVVKDLSVELDRLSEESVNNDISSWTKGRSGEALSLLKKRFSHRPVQEKFVCLNCGFETHADEQAALNIARSWLFLRSQEYKKYQTNKTTGNTDKRAFVETWQSFYRKKLKEVWKPAV

SEQ ID NO: 566 - protein, 979 aa, synthetic construct
  REGION 1..979: note = CasX variant
QEIKRINKIRRRLVKDSNTKKAGKTGPMKTLLVRVMTPDLRERLENLRKKPENIPQPISNTSRANLNKLLTDYTEMKKAILHVYWEEFQKDPVGLMSRVAQPASKKIDQNKLKPEMDEKGNLTTAGFACSQCGQPLFVYKLEQVSEKGKAYTNYFGRCNVAEHEKLILLAQLKPEKDSDEAVTYSLGKFGQRALDFYSIHVTKESTHPVKPLAQIAGNRYASGPVGKALSDACMGTIASFLSKYQDIIIEHQKVVKGNQKRLESLRELAGKENLEYPSVTLPPQPHTKEGVDAYNEVIARVRMWVNLNLWQKLKLSRDDAKPLLRLKGFPSFPLVERQANEVDWWDMVCNVKKLIINEKKEDGKVFWQNLAGYKRQEALRPYLSSEEDRKKGKKFARYQLGDLLLHLEKKHGEDWGKVYDEAWERIDKKVEGLSKHIKLEEERRSEDAQSKAALTDWLRAKASFVIEGLKEADKDEFCRCELKLQKWYGDLRGKPFAIEAENSILDISGFSKQYNCAFIWQKDGVKKLNLYLIINYFKGGKLRFKKIKPEAFEANRFYTVINKKSGEIVPMEVNFNFDDPNLIILPLAFGKRQGREFIWNDLLSLETGSLKLANGRVIEKTLYNRRTRQDEPALFVALTFERREVLDSSNIKPMNLIGVDRGENIPAVIALTDPEGCPLSRFKDSLGNPTHILRIGESYKEKQRTIQAKKEVEQRRAGGYSRKYASKAKNLADDMVRNTARDLLYYAVTQDAMLIFENLSRGFGRQGKRTFMAERQYTRMEDWLTAKLAYEGLPSKTYLSKTLAQYTSKTCSNCGFTITSADYDRVLEKLKKTATGWMTTINGKELKVEGQITYYNRYKRQNVVKDLSVELDRLSEESVNNDISSWTKGRSGEALSLLKKRFSHRPVQEKFVCLNCGFETHADEQAALNIARSWLFLRSQEYKKYQTNKTTGNTDKRAFVETWQSFYRKKLKEVWKPAV

SEQ ID NO: 567 - protein, 979 aa, synthetic construct
  REGION 1..979: note = CasX variant
QEIKRINKIRRRLVKDSNTKKAGKTRGPMKTLLVRVMTPDLRERLENLRKKPENIPQPISNTSRANLNKLLTDYTEMKKAILHVYWEEFQKDPVGLMSRVAQPASKKIDQNKLKPEMDEKGNLTTAGFACSQCGQPLFVYKLEQVSEKGKAYTNYFGRCNVAEHEKLILLAQLKPEKDSDEAVTYSLGKFGQRALDFYSIHVTKESTHPVKPLAQIAGNRYASSPVGKALSDACMGTIASFLSKYQDIIIEHQKVVKGNQKRLESLRELAGKENLEYPSVTLPPQPHTKEGVDAYNEVIARVRMWVNLNLWQKLKLSRDDAKPLLRLKGFPSFPLVERQANEVDWWDMVCNVKKLINEKKEDGKVFWQNLAGYKRQEALRPYLSSEEDRKKGKKFARYQLGDLLLHLEKKHGEDWGKVYDEAWERIDKKVEGLSKHIKLEEERRSEDAQSKAALTDWLRAKASFVIEGLKEADKDEFCRCELKLQKWYGDLRGKPFAIEAENSILDISGFSKQYNCAFIWQKDGVKKLNLYLIINYFKGGKLRFKKIKPEAFEANRFYTVINKKSGEIVPMEVNFNFDDPNLIILPLAFGKRQGREFIWNDLLSLETGSLKLANGRVIEKTLYNRRTRQDEPALFVALTFERREVLDSSNIKPMNLIGVDRGENIPAVIALTDPEGCPLSRFKDSLGNPTHILRIGESYKEKQRTIQAKKEVEQRRAGGYSRKYASKAKNLADDMVRNTARDLLYYAVTQDAMLIFENLSRGFGRQGKRTFMAERQYTRMEDWLTAKLAYEGLPSKTYLSKTLAQYTSKTCSNCGFTITSADYDRVLEKLKKTATGWMTTINGKELKVEGQITYYNRYKRQNVVKDLSVELDRLSEESVNNDISSWTKGRSGEALSLLKKRFSHRPVQEKFVCLNCGFETHADEQAALNIARSWLFLRSQEYKKYQTNKTTGNTDKRAFVETWQSFYRKKLKEVWKPAV

SEQ ID NO: 568 - protein, 979 aa, synthetic construct
  REGION 1..979: note = CasX variant
QEIKRINKIRRRLVKDSNTKKAGKTRGPMKTLLVRVMTPDLRERLENLRKKPENIPQPISNTSRANLNKLLTDYTEMKKAILHVYWEEFQKDPVGLMSRVAQPASKKIDQNKLKPEMDEKGNLTTAGFACSQCGQPLFVYKLEQVSEKGKAYTNYFGRCNVAEHEKLILLAQLKPEKDSDEAVTYSLGKFGQRALDFYSIHVTKESTHPVKPLAQIAGNRYASGPVGKALSGACMGTIASFLSKYQDIIIEHQKVVKGNQKRLESLRELAGKENLEYPSVTLPPQPHTKEGVDAYNEVIARVRMWVNLNLWQKLKLSRDDAKPLLRLKGFPSFPLVERQANEVDWWDMVCNVKKLINEKKEDGKVFWQNLAGYKRQEALRPYLSSEEDRKKGKKFARYQLGDLLLHLEKKHGEDWGKVYDEAWERIDKKVEGLSKHIKLEEERRSEDAQSKAALTDWLRAKASFVIEGLKEADKDEFCRCELKLQKWYGDLRGKPFAIEAENSILDISGFSKQYNCAFIWQKDGVKKLNLYLIINYFKGGKLRFKKIKPEAFEANRFYTVINKKSGEIVPMEVNFNFDDPNLIILPLAFGKRQGREFIWNDLLSLETGSLKLANGRVIEKTLYNRRTRQDEPALFVALTFERREVLDSSNIKPMNLIGVDRGENIPAVIALTDPEGCPLSRFKDSLGNPTHILRIGESYKEKQRTIQAKKEVEQRRAGGYSRKYASKAKNLADDMVRNTARDLLYYAVTQDAMLIFENLSRGFGRQGKRTFMAERQYTRMEDWLTAKLAYEGLPSKTYLSKTLAQYTSKTCSNCGFTITSADYDRVLEKLKKTATGWMTTINGKELKVEGQITYYNRYKRQNVVKDLSVELDRLSEESVNNDISSWTKGRSGEALSLLKKRFSHRPVQEKFVCLNCGFETHADEQAALNIARSWLFLRSQEYKKYQTNKTTGNTDKRAFVETWQSFYRKKLKEVWKPAV

SEQ ID NO: 569 - protein, 978 aa, synthetic construct
  REGION 1..978: note = CasX variant
QEIKRINKIRRRLVKDSNTKKAGKTGPMKTLLVRVMTPDLRERLENLRKKPENIPQPISNTSRANLNKLLTDYTEMKKAILHVYWEEFQKDPVGLMSRVAQPASKKIDQNKLKPEMDEKGNLTTAGFACSQCGQPLFVYKLEQVSEKGKAYTNYFGRCNVAEHEKLILLAQLKPEKDSDEAVTYSLGKFGQRALDFYSIHVTKESTHPVKPLAQIAGNRYASGPVGKALSDACMGTIASFLSKYQDIIIEHQKVVKGNQKRLESLRELAGKENLEYPSVTLPPQPHTKEGVDAYNEVIARVRMWVNLNLWQKLKLSRDDAKPLLRLKGFPSFPLVERQANEVDWWDMVCNVKKLINEKKEDGKVFWQNLAGYKRQEALRPYLSSPEDRKKGKKFARYQFGDLLLHLEKKHGEDWGKVYDEAWERIDKKVEGLSKHIKLEEERRSEDAQSKAALTDWLRAKASFVIEGLKEADKDEFCRCELKLQKWYGDLRGKPFAIEAENSILDISGFSKQYNCAFIWQKDGVKKLNLYLIINYFKGGKLRFKKIKPEAFEANRFYTVINKKSGEIVPMEVNFNFDDPNLIILPLAFGKRQGREFIWNDLLSLETGSLKLANGRVIEKTLYNRRTRQDEPALFVALTFERREVLDSSNIKPMNLIGVDRGENIPAVIALTDPEGCPLSRFKDSLGNPTHILRIGESYKEKQRTIQAKKEVEQRRAGGYSRKYASKAKNLANDMVRNTARDLLYYAVTQDAMLIFENLSRGFGRQGKRTFMAERQYTRMEDWLTAKLAYEGLPSKTYLSKTLAQYTSKTCSNCGFTITSADYDRVLEKLKKTATGWMTTINGKELKVEGQITYYNRRKRQNVVKDLSVELDRLSEESVNNDISSWTKGRSGEALSLLKKRFSHRPVQEKFVCLNCGFETHADEQAALNIARSWLFLRSQEYKKYQTNKTTGNTDKRAFVETWQSFYRKKLKEVWKPAV

SEQ ID NO: 570 - protein, 978 aa, synthetic construct
  REGION 1..978: note = CasX variant
QEIKRINKIRRRLVKDSNTKKAGKTGPMKTLLVRVMTPDLRERLENLRKKPENIPQPISNTSRANLNKLLTDYTEMKKAILHVYWEEFQKDPVGLMSRVAQPASKKIDQNKLKPEMDEKGNLTTAGFACSQCGQPLFVYKLEQVSEKGKAYTNYFGRCNVAEHEKLIKLAQLKPEKDSDEAVTYSLGKFGQRALDFYSIHVTKESTHPVKPLAQIAGNRYASSPVGKALSDACMGTIASFLSKYQDIIIEHQKVVKGNQKRLESLRELAGKENLEYPSVTLPPQPHTKEGVDAYNEVIARVRMWVNLNLWQKLKLSRDDAKPLLRLKGFPSFPLVERQANEVDWWDMVCNVKKLINEKKEDGKVFWQNLAGYKRQEALRPYLSSEEDRKKGKKFARYQLGDLLLHLEKKHGEDWGKVYDEAWERIDKKVEGLSKHIKLEEERRSEDAQSKAALTDWLRAKASFVIEGLKEADKDEFCRCELKLQKWYGDLRGKPFAIEAENSILDISGFSKQYNCAFIWQKDGVKKLNLYLIINYFKGGKLRFKKIKPEAFEANRFYTVINKKSGEIVPMEVNFNFDDPNLIILPLAFGKRQGREFIWNDLLSLETGSLKLANGRVIEKTLYNRRTRQDEPALFVALTFERREVLDSSNIKPMNLIGVDRGENIPAVIALTDPEGCPLSRFKDSLGNPTHILRIGESYKEKQRTIQAKKEVEQRRAGGYSRKYASKAKNLADDMVRNTARDLLYYAVTQDAMLIFENLSRGFGRQGKRTFMAERQYTRMEDWLTAKLAYEGLPSKTYLSKTLAQYTSKTCSNCGFTITSADYDRVLEKLKKTATGWMTTINGKELKVEGQITYYNRYKRQNVVKDLSVELDRLSEESVNNDISSWTKGRSGEALSLLKKRFSHRPVQEKFVCLNCGFETHADEQAALNIARSWLFLRSQEYKKYQTNKTTGNTDKRAFVETWQSFYRKKLKEVWKPAV

SEQ ID NO: 571 - protein, 978 aa, synthetic construct
  REGION 1..978: note = CasX variant
QEIKRINKIRRRLVKDSNTKKAGKTGPMKTLLVRVMTPDLRERLENLRKKPENIPQPISNTSRANLNKLLTDYTEMKKAILHVYWEEFQKDPVGLMSRVAQPASKKIDQNKLKPEMDEKGNLTTAGFACSQCGQPLFVYKLEQVSEKGKAYTNYFGRCNVAEHEKLILLAQLKPEKDSDEAVTYSLGKFGQRALDFYSIHVTKESTHPVKPLAQIAGNRYASSPVGKALSGACMGTIASFLSKYQDIIIEHQKVVKGNQKRLESLRELAGKENLEYPSVTLPPQPHTKEGVDAYNEVIARVRMWVNLNLWQKLKLSRDDAKPLLRLKGFPSFPLVERQANEVDWWDMVCNVKKLINEKKEDGKVFWQNLAGYKRQEALRPYLSSEEDRKKGKKFARYQLGDLLLHLEKKHGEDWGKVYDEAWERIDKKVEGLSKHIKLEEERRSEDAQSKAALTDWLRAKASFVIEGLKEADKDEFCRCELKLQKWYGDLRGKPFAIEAENSILDISGFSKQYNCAFIWQKDGVKKLNLYLIINYFKGGKLRFKKIKPEAFEANRFYTVINKKSGEIVPMEVNFNFDDPNLIILPLAFGKRQGREFIWNDLLSLETGSLKLANGRVIEKTLYNRRTRQDEPALFVALTFERREVLDSSNIKPMNLIGVDRGENIPAVIALTDPEGCPLSRFKDSLGNPTHILRIGESYKEKQRTIQAKKEVEQRRAGGYSRKYASKAKNLADDMVRNTARDLLYYAVTQDAMLIFENLSRGFGRQGKRTFMAERQYTRMEDWLTAKLAYEGLPSKTYLSKTLAQYTSKTCSNCGFTITSADYDRVLEKLKKTATGWMTTINGKELKVEGQITYYNRYKRQNVVKDLSVELDRLSEESVNNDISSWTKGRSGEALSLLKKRFSHRPVQEKFVCLNCGFETHADEQAALNIARSWLFLRSQEYKKYQTNKTTGNTDKRAFVETWQSFYRKKLKEVWKPAV

SEQ ID NO: 572 - protein, 978 aa, synthetic construct
  REGION 1..978: note = CasX variant
QEIKRINKIRRRLVKDSNTKKAGKTGPMKTLLVRVMTPDLRERLENLRKKPENIPQPISNTSRANLNKLLTDYTEMKKAILHVYWEEFQKDPVGLMSRVAQPASKKIDQNKLKPEMDEKGNLTTAGFACSQCGQPLFVYKLEQVSEKGKAYTNYFGRCNVAEHEKLIKLAQLKPEKDSDEAVTYSLGKFGQRALDFYSIHVTKESTHPVKPLAQIAGNRYASSPVGKALSGACMGTIASFLSKYQDIIIEHQKVVKGNQKRLESLRELAGKENLEYPSVTLPPQPHTKEGVDAYNEVIARVRMWVNLNLWQKLKLSRDDAKPLLRLKGFPSFPLVERQANEVDWWDMVCNVKKLINEKKEDGKVFWQNLAGYKRQEALRPYLSSEEDRKKGKKFARYQLGDLLLHLEKKHGEDWGKVYDEAWERIDKKVEGLSKHIKLEEERRSEDAQSKAALTDWLRAKASFVIEGLKEADKDEFCRCELKLQKWYGDLRGKPFAIEAENSILDISGFSKQYNCAFIWQKDGVKKLNLYLIINYFKGGKLRFKKIKPEAFEANRFYTVINKKSGEIVPMEVNFNFDDPNLIILPLAFGKRQGREFIWNDLLSLETGSLKLANGRVIEKTLYNRRTRQDEPALFVALTFERREVLDSSNIKPMNLIGVDRGENIPAVIALTDPEGCPLSRFKDSLGNPTHILRIGESYKEKQRTIQAKKEVEQRRAGGYSRKYASKAKNLADDMVRNTARDLLYYAVTQDAMLIFENLSRGFGRQGKRTFMAERQYTRMEDWLTAKLAYEGLPSKTYLSKTLAQYTSKTCSNCGFTITSADYDRVLEKLKKTATGWMTTINGKELKVEGQITYYNRYKRQNVVKDLSVELDRLSEESVNNDISSWTKGRSGEALSLLKKRFSHRPVQEKFVCLNCGFETHADEQAALNIARSWLFLRSQEYKKYQTNKTTGNTDKRAFVETWQSFYRKKLKEVWKPAV

SEQ ID NO: 573 - protein, 979 aa, synthetic construct
  REGION 1..979: note = CasX variant
QEIKRINKIRRRLVKDSNTKKAGKTRGPMKTLLVRVMTPDLRERLENLRKKPENIPQPISNTSRANLNKLLTDYTEMKKAILHVYWEEFQKDPVGLMSRVAQPASKKIDQNKLKPEMDEKGNLTTAGFACSQCGQPLFVYKLEQVSEKGKAYTNYFGRCNVAEHEKLIKLAQLKPEKDSDEAVTYSLGKFGQRALDFYSIHVTKESTHPVKPLAQIAGNRYASGPVGKALSDACMGTIASFLSKYQDIIIEHQKVVKGNQKRLESLRELAGKENLEYPSVTLPPQPHTKEGVDAYNEVIARVRMWVNLNLWQKLKLSRDDAKPLLRLKGFPSFPLVERQANEVDWWDMVCNVKKLINEKKEDGKVFWQNLAGYKRQEALRPYLSSEEDRKKGKKFARYQLGDLLLHLEKKHGEDWGKVYDEAWERIDKKVEGLSKHIKLEEERRSEDAQSKAALTDWLRAKASFVIEGLKEADKDEFCRCELKLQKWYGDLRGKPFAIEAENSILDISGFSKQYNCAFIWQKDGVKKLNLYLIINYFKGGKLRFKKIKPEAFEANRFYTVINKKSGEIVPMEVNFNFDDPNLIILPLAFGKRQGREFIWNDLLSLETGSLKLANGRVIEKTLYNRRTRQDEPALFVALTFERREVLDSSNIKPMNLIGVDRGENIPAVIALTDPEGCPLSRFKDSLGNPTHILRIGESYKEKQRTIQAKKEVEQRRAGGYSRKYASKAKNLADDMVRNTARDLLYYAVTQDAMLIFENLSRGFGRQGKRTFMAERQYTRMEDWLTAKLAYEGLPSKTYLSKTLAQYTSKTCSNCGFTITSADYDRVLEKLKKTATGWMTTINGKELKVEGQITYYNRYKRQNVVKDLSVELDRLSEESVNNDISSWTKGRSGEALSLLKKRFSHRPVQEKFVCLNCGFETHADEQAALNIARSWLFLRSQEYKKYQTNKTTGNTDKRAFVETWQSFYRKKLKEVWKPAV

SEQ ID NO: 574 - protein, 979 aa, synthetic construct
  REGION 1..979: note = CasX variant
QEIKRINKIRRRLVKDSNTKKAGKTRGPMKTLLVRVMTPDLRERLENLRKKPENIPQPISNTSRANLNKLLTDYTEMKKAILHVYWEEFQKDPVGLMSRVAQPASKKIDQNKLKPEMDEKGNLTTAGFACSQCGQPLFVYKLEQVSEKGKAYTNYFGRCNVAEHEKLIKLAQLKPEKDSDEAVTYSLGKFGQRALDFYSIHVTKESTHPVKPLAQIAGNRYASSPVGKALSDACMGTIASFLSKYQDIIIEHQKVVKGNQKRLESLRELAGKENLEYPSVTLPPQPHTKEGVDAYNEVIARVRMWVNLNLWQKLKLSRDDAKPLLRLKGFPSFPLVERQANEVDWWDMVCNVKKLINEKKEDGKVFWQNLAGYKRQEALRPYLSSEEDRKKGKKFARYQLGDLLLHLEKKHGEDWGKVYDEAWERIDKKVEGLSKHIKLEEERRSEDAQSKAALTDWLRAKASFVIEGLKEADKDEFCRCELKLQKWYGDLRGKPFAIEAENSILDISGFSKQYNCAFIWQKDGVKKLNLYLIINYFKGGKLRFKKIKPEAFEANRFYTVINKKSGEIVPMEVNFNFDDPNLIILPLAFGKRQGREFIWNDLLSLETGSLKLANGRVIEKTLYNRRTRQDEPALFVALTFERREVLDSSNIKPMNLIGVDRGENIPAVIALTDPEGCPLSRFKDSLGNPTHILRIGESYKEKQRTIQAKKEVEQRRAGGYSRKYASKAKNLADDMVRNTARDLLYYAVTQDAMLIFENLSRGFGRQGKRTFMAERQYTRMEDWLTAKLAYEGLPSKTYLSKTLAQYTSKTCSNCGFTITSADYDRVLEKLKKTATGWMTTINGKELKVEGQITYYNRYKRQNVVKDLSVELDRLSEESVNNDISSWTKGRSGEALSLLKKRFSHRPVQEKFVCLNCGFETHADEQAALNIARSWLFLRSQEYKKYQTNKTTGNTDKRAFVETWQSFYRKKLKEVWKPAV

SEQ ID NO: 575 - protein, 979 aa, synthetic construct
  REGION 1..979: note = CasX variant
QEIKRINKIRRRLVKDSNTKKAGKTRGPMKTLLVRVMTPDLRERLENLRKKPENIPQPISNTSRANLNKLLTDYTEMKKAILHVYWEEFQKDPVGLMSRVAQPASKKIDQNKLKPEMDEKGNLTTAGFACSQCGQPLFVYKLEQVSEKGKAYTNYFGRCNVAEHEKLIKLAQLKPEKDSDEAVTYSLGKFGQRALDFYSIHVTKESTHPVKPLAQIAGNRYASSPVGKALSGACMGTIASFLSKYQDIIIEHQKVVKGNQKRLESLRELAGKENLEYPSVTLPPQPHTKEGVDAYNEVIARVRMWVNLNLWQKLKLSRDDAKPLLRLKGFPSFPLVERQANEVDWWDMVCNVKKLINEKKEDGKVFWQNLAGYKRQEALRPYLSSEEDRKKGKKFARYQLGDLLLHLEKKHGEDWGKVYDEAWERIDKKVEGLSKHIKLEEERRSEDAQSKAALTDWLRAKASFVIEGLKEADKDEFCRCELKLQKWYGDLRGKPFAIEAENSILDISGFSKQYNCAFIWQKDGVKKLNLYLIINYFKGGKLRFKKIKPEAFEANRFYTVINKKSGEIVPMEVNFNFDDPNLIILPLAFGKRQGREFIWNDLLSLETGSLKLANGRVIEKTLYNRRTRQDEPALFVALTFERREVLDSSNIKPMNLIGVDRGENIPAVIALTDPEGCPLSRFKDSLGNPTHILRIGESYKEKQRTIQAKKEVEQRRAGGYSRKYASKAKNLADDMVRNTARDLLYYAVTQDAMLIFENLSRGFGRQGKRTFMAERQYTRMEDWLTAKLAYEGLPSKTYLSKTLAQYTSKTCSNCGFTITSADYDRVLEKLKKTATGWMTTINGKELKVEGQITYYNRYKRQNVVKDLSVELDRLSEESVNNDISSWTKGRSGEALSLLKKRFSHRPVQEKFVCLNCGFETHADEQAALNIARSWLFLRSQEYKKYQTNKTTGNTDKRAFVETWQSFYRKKLKEVWKPAV

SEQ ID NO: 576 - protein, 978 aa, synthetic construct
  REGION 1..978: note = CasX variant
QEIKRINKIRRRLVKDSNTKKAGKTGPMKTLLVRVMTPDLRERLENLRKKPENIPQPISNTSRANLNKLLTDYTEMKKAILHVYWEEFQKDPVGLMSRVAQPASKKIDQNKLKPEMDEKGNLTTAGFACSQCGQPLFVYKLEQVSEKGKAYTNYFGRCNVAEHEKLILLAQLKPEKDSDEAVTYSLGKFGQRALDFYSIHVTKESTHPVKPLAQIAGNRYASYPVGKALSGACMGTIASFLSKYQDIIIEHQKVVKGNQKRLESLRELAGKENLEYPSVTLPPQPHTKEGVDAYNEVIARVRMWVNLNLWQKLKLSRDDAKPLLRLKGFPSFPLVERQANEVDWWDMVCNVKKLINEKKEDGKVFWQNLAGYKRQEALRPYLSSEEDRKKGKKFARYQLGDLLLHLEKKHGEDWGKVYDEAWERIDKKVEGLSKHIKLEEERRSEDAQSKAALTDWLRAKASFVIEGLKEADKDEFCRCELKLQKWYGDLRGKPFAIEAENSILDISGFSKQYNCAFIWQKDGVKKLNLYLIINYFKGGKLRFKKIKPEAFEANRFYTVINKKSGEIVPMEVNFNFDDPNLIILPLAFGKRQGREFIWNDLLSLETGSLKLANGRVIEKTLYNRRTRQDEPALFVALTFERREVLDSSNIKPMNLIGVDRGENIPAVIALTDPEGCPLSRFKDSLGNPTHILRIGESYKEKQRTIQAKKEVEQRRAGGYSRKYASKAKNLADDMVRNTARDLLYYAVTQDAMLIFENLSRGFGRQGKRTFMAERQYTRMEDWLTAKLAYEGLPSKTYLSKTLAQYTSKTCSNCGFTITSADYDRVLEKLKKTATGWMTTINGKELKVEGQITYYNRYKRQNVVKDLSVELDRLSEESVNNDISSWTKGRSGEALSLLKKRFSHRPVQEKFVCLNCGFETHADEQAALNIARSWLFLRSQEYKKYQTNKTTGNTDKRAFVETWQSFYRKKLKEVWKPAV

SEQ ID NO: 577 - protein, 978 aa, synthetic construct
  REGION 1..978: note = CasX variant
QEIKRINKIRRRLVKDSNTKKAGKTGPMKTLLVRVMTPDLRERLENLRKKPENIPQPISNTSRANLNKLLTDYTEMKKAILHVYWEEFQKDPVGLMSRVAQPASKKIDQNKLKPEMDEKGNLTTAGFACSQCGQPLFVYKLEQVSEKGKAYTNYFGRCNVAEHEKLILLAQLKPEKDSDEAVTYSLGKFGQRALDFYSIHVTKESTHPVKPLAQIAGNRYASHPVGKALSGACMGTIASFLSKYQDIIIEHQKVVKGNQKRLESLRELAGKENLEYPSVTLPPQPHTKEGVDAYNEVIARVRMWVNLNLWQKLKLSRDDAKPLLRLKGFPSFPLVERQANEVDWWDMVCNVKKLINEKKEDGKVFWQNLAGYKRQEALRPYLSSEEDRKKGKKFARYQLGDLLLHLEKKHGEDWGKVYDEAWERIDKKVEGLSKHIKLEEERRSEDAQSKAALTDWLRAKASFVIEGLKEADKDEFCRCELKLQKWYGDLRGKPFAIEAENSILDISGFSKQYNCAFIWQKDGVKKLNLYLIINYFKGGKLRFKKIKPEAFEANRFYTVINKKSGEIVPMEVNFNFDDPNLIILPLAFGKRQGREFIWNDLLSLETGSLKLANGRVIEKTLYNRRTRQDEPALFVALTFERREVLDSSNIKPMNLIGVDRGENIPAVIALTDPEGCPLSRFKDSLGNPTHILRIGESYKEKQRTIQAKKEVEQRRAGGYSRKYASKAKNLADDMVRNTARDLLYYAVTQDAMLIFENLSRGFGRQGKRTFMAERQYTRMEDWLTAKLAYEGLPSKTYLSKTLAQYTSKTCSNCGFTITSADYDRVLEKLKKTATGWMTTINGKELKVEGQITYYNRYKRQNVVKDLSVELDRLSEESVNNDISSWTKGRSGEALSLLKKRFSHRPVQEKFVCLNCGFETHADEQAALNIARSWLFLRSQEYKKYQTNKTTGNTDKRAFVETWQSFYRKKLKEVWKPAV

SEQ ID NO: 578 - protein, 979 aa, synthetic construct
  REGION 1..979: note = CasX variant
QEIKRINKIRRRLVKDSNTKKAGKTRGPMKTLLVRVMTPDLRERLENLRKKPENIPQPISNTSRANLNKLLTDYTEMKKAILHVYWEEFQKDPVGLMSRVAQPASKKIDQNKLKPEMDEKGNLTTAGFACSQCGQPLFVYKLEQVSEKGKAYTNYFGRCNVAEHEKLILLAQLKPEKDSDEAVTYSLGKFGQRALDFYSIHVTKESTHPVKPLAQIAGNRYASYPVGKALSGACMGTIASFLSKYQDIIIEHQKVVKGNQKRLESLRELAGKENLEYPSVTLPPQPHTKEGVDAYNEVIARVRMWVNLNLWQKLKLSRDDAKPLLRLKGFPSFPLVERQANEVDWWDMVCNVKKLINEKKEDGKVFWQNLAGYKRQEALRPYLSSEEDRKKGKKFARYQLGDLLLHLEKKHGEDWGKVYDEAWERIDKKVEGLSKHIKLEEERRSEDAQSKAALTDWLRAKASFVIEGLKEADKDEFCRCELKLQKWYGDLRGKPFAIEAENSILDISGFSKQYNCAFIWQKDGVKKLNLYLIINYFKGGKLRFKKIKPEAFEANRFYTVINKKSGEIVPMEVNFNFDDPNLIILPLAFGKRQGREFIWNDLLSLETGSLKLANGRVIEKTLYNRRTRQDEPALFVALTFERREVLDSSNIKPMNLIGVDRGENIPAVIALTDPEGCPLSRFKDSLGNPTHILRIGESYKEKQRTIQAKKEVEQRRAGGYSRKYASKAKNLADDMVRNTARDLLYYAVTQDAMLIFENLSRGFGRQGKRTFMAERQYTRMEDWLTAKLAYEGLPSKTYLSKTLAQYTSKTCSNCGFTITSADYDRVLEKLKKTATGWMTTINGKELKVEGQITYYNRYKRQNVVKDLSVELDRLSEESVNNDISSWTKGRSGEALSLLKKRFSHRPVQEKFVCLNCGFETHADEQAALNIARSWLFLRSQEYKKYQTNKTTGNTDKRAFVETWQSFYRKKLKEVWKPAV

SEQ ID NO: 579 - protein, 979 aa, synthetic construct
  REGION 1..979: note = CasX variant
QEIKRINKIRRRLVKDSNTKKAGKTRGPMKTLLVRVMTPDLRERLENLRKKPENIPQPISNTSRANLNKLLTDYTEMKKAILHVYWEEFQKDPVGLMSRVAQPASKKIDQNKLKPEMDEKGNLTTAGFACSQCGQPLFVYKLEQVSEKGKAYTNYFGRCNVAEHEKLILLAQLKPEKDSDEAVTYSLGKFGQRALDFYSIHVTKESTHPVKPLAQIAGNRYASHPVGKALSGACMGTIASFLSKYQDIIIEHQKVVKGNQKRLESLRELAGKENLEYPSVTLPPQPHTKEGVDAYNEVIARVRMWVNLNLWQKLKLSRDDAKPLLRLKGFPSFPLVERQANEVDWWDMVCNVKKLINEKKEDGKVFWQNLAGYKRQEALRPYLSSEEDRKKGKKFARYQLGDLLLHLEKKHGEDWGKVYDEAWERIDKKVEGLSKHIKLEEERRSEDAQSKAALTDWLRAKASFVIEGLKEADKDEFCRCELKLQKWYGDLRGKPFAIEAENSILDISGFSKQYNCAFIWQKDGVKKLNLYLIINYFKGGKLRFKKIKPEAFEANRFYTVINKKSGEIVPMEVNFNFDDPNLIILPLAFGKRQGREFIWNDLLSLETGSLKLANGRVIEKTLYNRRTRQDEPALFVALTFERREVLDSSNIKPMNLIGVDRGENIPAVIALTDPEGCPLSRFKDSLGNPTHILRIGESYKEKQRTIQAKKEVEQRRAGGYSRKYASKAKNLADDMVRNTARDLLYYAVTQDAMLIFENLSRGFGRQGKRTFMAERQYTRMEDWLTAKLAYEGLPSKTYLSKTLAQYTSKTCSNCGFTITSADYDRVLEKLKKTATGWMTTINGKELKVEGQITYYNRYKRQNVVKDLSVELDRLSEESVNNDISSWTKGRSGEALSLLKKRFSHRPVQEKFVCLNCGFETHADEQAALNIARSWLFLRSQEYKKYQTNKTTGNTDKRAFVETWQSFYRKKLKEVWKPAV

SEQ ID NO: 580 - protein, 978 aa, synthetic construct
  REGION 1..978: note = CasX variant
QEIKRINKIRRRLVKDSNTKKAGKTGPMKTLLVRVMTPDLRERLENLRKKPENIPQPISNTSRANLNKLLTDYTEMKKAILHVYWEEFQKDPVGLMSRVAQPASKKIDQNKLKPEMDEKGNLTTAGFACSQCGQPLFVYKLEQVSEKGKAYTNYFGRCNVAEHEKLIKLAQLKPEKDSDEAVTYSLGKFGQRALDFYSIHVTKESTHPVKPLAQIAGNRYASGPVGKALSGACMGTIASFLSKYQDIIIEHQKVVKGNQKRLESLRELAGKENLEYPSVTLPPQPHTKEGVDAYNEVIARVRMWVNLNLWQKLKLSRDDAKPLLRLKGFPSFPLVERQANEVDWWDMVCNVKKLINEKKEDGKVFWQNLAGYKRQEALRPYLSSEEDRKKGKKFARYQLGDLLLHLEKKHGEDWGKVYDEAWERIDKKVEGLSKHIKLEEERRSEDAQSKAALTDWLRAKASFVIEGLKEADKDEFCRCELKLQKWYGDLRGKPFAIEAENSILDISGFSKQYNCAFIWQKDGVKKLNLYLIINYFKGGKLRFKKIKPEAFEANRFYTVINKKSGEIVPMEVNFNFDDPNLIILPLAFGKRQGREFIWNDLLSLETGSLKLANGRVIEKTLYNRRTRQDEPALFVALTFERREVLDSSNIKPMNLIGVDRGENIPAVIALTDPEGCPLSRFKDSLGNPTHILRIGESYKEKQRTIQAKKEVEQRRAGGYSRKYASKAKNLADDMVRNTARDLLYYAVTQDAMLIFENLSRGFGRQGKRTFMAERQYTRMEDWLTAKLAYEGLPSKTYLSKTLAQYTSKTCSNCGFTITSADYDRVLEKLKKTATGWMTTINGKELKVEGQITYYNRYKRQNVVKDLSVELDRLSEESVNNDISSWTKGRSGEALSLLKKRFSHRPVQEKFVCLNCGFETHADEQAALNIARSWLFLRSQEYKKYQTNKTTGNTDKRAFVETWQSFYRKKLKEVWKPAV

SEQ ID NO: 581 - protein, 978 aa, synthetic construct
  REGION 1..978: note = CasX variant
QEIKRINKIRRRLVKDSNTKKAGKTGPMKTLLVRVMTPDLRERLENLRKKPENIPQPISNTSRANLNKLLTDYTEMKKAILHVYWEEFQKDPVGLMSRVAQPASKKIDQNKLKPEMDEKGNLTTAGFACSQCGQPLFVYKLEQVSEKGKAYTNYFGRCNVAEHEKLIKLAQLKPEKDSDEAVTYSLGKFGQRALDFYSIHVTKESTHPVKPLAQIAGNRYASYPVGKALSGACMGTIASFLSKYQDIIIEHQKVVKGNQKRLESLRELAGKENLEYPSVTLPPQPHTKEGVDAYNEVIARVRMWVNLNLWQKLKLSRDDAKPLLRLKGFPSFPLVERQANEVDWWDMVCNVKKLINEKKEDGKVFWQNLAGYKRQEALRPYLSSEEDRKKGKKFARYQLGDLLLHLEKKHGEDWGKVYDEAWERIDKKVEGLSKHIKLEEERRSEDAQSKAALTDWLRAKASFVIEGLKEADKDEFCRCELKLQKWYGDLRGKPFAIEAENSILDISGFSKQYNCAFIWQKDGVKKLNLYLIINYFKGGKLRFKKIKPEAFEANRFYTVINKKSGEIVPMEVNFNFDDPNLIILPLAFGKRQGREFIWNDLLSLETGSLKLANGRVIEKTLYNRRTRQDEPALFVALTFERREVLDSSNIKPMNLIGVDRGENIPAVIALTDPEGCPLSRFKDSLGNPTHILRIGESYKEKQRTIQAKKEVEQRRAGGYSRKYASKAKNLADDMVRNTARDLLYYAVTQDAMLIFENLSRGFGRQGKRTFMAERQYTRMEDWLTAKLAYEGLPSKTYLSKTLAQYTSKTCSNCGFTITSADYDRVLEKLKKTATGWMTTINGKELKVEGQITYYNRYKRQNVVKDLSVELDRLSEESVNNDISSWTKGRSGEALSLLKKRFSHRPVQEKFVCLNCGFETHADEQAALNIARSWLFLRSQEYKKYQTNKTTGNTDKRAFVETWQSFYRKKLKEVWKPAV

SEQ ID NO: 582 - protein, 979 aa, synthetic construct
  REGION 1..979: note = CasX variant
QEIKRINKIRRRLVKDSNTKKAGKTRGPMKTLLVRVMTPDLRERLENLRKKPENIPQPISNTSRANLNKLLTDYTEMKKAILHVYWEEFQKDPVGLMSRVAQPASKKIDQNKLKPEMDEKGNLTTAGFACSQCGQPLFVYKLEQVSEKGKAYTNYFGRCNVAEHEKLIKLAQLKPEKDSDEAVTYSLGKFGQRALDFYSIHVTKESTHPVKPLAQIAGNRYASGPVGKALSGACMGTIASFLSKYQDIIIEHQKVVKGNQKRLESLRELAGKENLEYPSVTLPPQPHTKEGVDAYNEVIARVRMWVNLNLWQKLKLSRDDAKPLLRLKGFPSFPLVERQANEVDWWDMVCNVKKLINEKKEDGKVFWQNLAGYKRQEALRPYLSSEEDRKKGKKFARYQLGDLLLHLEKKHGEDWGKVYDEAWERIDKKVEGLSKHIKLEEERRSEDAQSKAALTDWLRAKASFVIEGLKEADKDEFCRCELKLQKWYGDLRGKPFAIEAENSILDISGFSKQYNCAFIWQKDGVKKLNLYLIINYFKGGKLRFKKIKPEAFEANRFYTVINKKSGEIVPMEVNFNFDDPNLIILPLAFGKRQGREFIWNDLLSLETGSLKLANGRVIEKTLYNRRTRQDEPALFVALTFERREVLDSSNIKPMNLIGVDRGENIPAVIALTDPEGCPLSRFKDSLGNPTHILRIGESYKEKQRTIQAKKEVEQRRAGGYSRKYASKAKNLADDMVRNTARDLLYYAVTQDAMLIFENLSRGFGRQGKRTFMAERQYTRMEDWLTAKLAYEGLPSKTYLSKTLAQYTSKTCSNCGFTITSADYDRVLEKLKKTATGWMTTINGKELKVEGQITYYNRYKRQNVVKDLSVELDRLSEESVNNDISSWTKGRSGEALSLLKKRFSHRPVQEKFVCLNCGFETHADEQAALNIARSWLFLRSQEYKKYQTNKTTGNTDKRAFVETWQSFYRKKLKEVWKPAV

SEQ ID NO: 583 - protein, 979 aa, synthetic construct
  REGION 1..979: note = CasX variant
QEIKRINKIRRRLVKDSNTKKAGKTRGPMKTLLVRVMTPDLRERLENLRKKPENIPQPISNTSRANLNKLLTDYTEMKKAILHVYWEEFQKDPVGLMSRVAQPASKKIDQNKLKPEMDEKGNLTTAGFACSQCGQPLFVYKLEQVSEKGKAYTNYFGRCNVAEHEKLIKLAQLKPEKDSDEAVTYSLGKFGQRALDFYSIHVTKESTHPVKPLAQIAGNRYASYPVGKALSGACMGTIASFLSKYQDIIIEHQKVVKGNQKRLESLRELAGKENLEYPSVTLPPQPHTKEGVDAYNEVIARVRMWVNLNLWQKLKLSRDDAKPLLRLKGFPSFPLVERQANEVDWWDMVCNVKKLINEKKEDGKVFWQNLAGYKRQEALRPYLSSEEDRKKGKKFARYQLGDLLLHLEKKHGEDWGKVYDEAWERIDKKVEGLSKHIKLEEERRSEDAQSKAALTDWLRAKASFVIEGLKEADKDEFCRCELKLQKWYGDLRGKPFAIEAENSILDISGFSKQYNCAFIWQKDGVKKLNLYLIINYFKGGKLRFKKIKPEAFEANRFYTVINKKSGEIVPMEVNFNFDDPNLIILPLAFGKRQGREFIWNDLLSLETGSLKLANGRVIEKTLYNRRTRQDEPALFVALTFERREVLDSSNIKPMNLIGVDRGENIPAVIALTDPEGCPLSRFKDSLGNPTHILRIGESYKEKQRTIQAKKEVEQRRAGGYSRKYASKAKNLADDMVRNTARDLLYYAVTQDAMLIFENLSRGFGRQGKRTFMAERQYTRMEDWLTAKLAYEGLPSKTYLSKTLAQYTSKTCSNCGFTITSADYDRVLEKLKKTATGWMTTINGKELKVEGQITYYNRYKRQNVVKDLSVELDRLSEESVNNDISSWTKGRSGEALSLLKKRFSHRPVQEKFVCLNCGFETHADEQAALNIARSWLFLRSQEYKKYQTNKTTGNTDKRAFVETWQSFYRKKLKEVWKPAV

SEQ ID NO: 584 - protein, 979 aa, synthetic construct
  REGION 1..979: note = CasX variant
QEIKRINKIRRRLVKDSNTKKAGKTRGPMKTLLVRVMTPDLRERLENLRKKPENIPQPISNTSRANLNKLLTDYTEMKKAILHVYWEEFQKDPVGLMSRVAQPASKKIDQNKLKPEMDEKGNLTTAGFACSQCGQPLFVYKLEQVSEKGKAYTNYFGRCNVAEHEKLIKLAQLKPEKDSDEAVTYSLGKFGQRALDFYSIHVTKESTHPVKPLAQIAGNRYASHPVGKALSGACMGTIASFLSKYQDIIIEHQKVVKGNQKRLESLRELAGKENLEYPSVTLPPQPHTKEGVDAYNEVIARVRMWVNLNLWQKLKLSRDDAKPLLRLKGFPSFPLVERQANEVDWWDMVCNVKKLINEKKEDGKVFWQNLAGYKRQEALRPYLSSEEDRKKGKKFARYQLGDLLLHLEKKHGEDWGKVYDEAWERIDKKVEGLSKHIKLEEERRSEDAQSKAALTDWLRAKASFVIEGLKEADKDEFCRCELKLQKWYGDLRGKPFAIEAENSILDISGFSKQYNCAFIWQKDGVKKLNLYLIINYFKGGKLRFKKIKPEAFEANRFYTVINKKSGEIVPMEVNFNFDDPNLIILPLAFGKRQGREFIWNDLLSLETGSLKLANGRVIEKTLYNRRTRQDEPALFVALTFERREVLDSSNIKPMNLIGVDRGENIPAVIALTDPEGCPLSRFKDSLGNPTHILRIGESYKEKQRTIQAKKEVEQRRAGGYSRKYASKAKNLADDMVRNTARDLLYYAVTQDAMLIFENLSRGFGRQGKRTFMAERQYTRMEDWLTAKLAYEGLPSKTYLSKTLAQYTSKTCSNCGFTITSADYDRVLEKLKKTATGWMTTINGKELKVEGQITYYNRYKRQNVVKDLSVELDRLSEESVNNDISSWTKGRSGEALSLLKKRFSHRPVQEKFVCLNCGFETHADEQAALNIARSWLFLRSQEYKKYQTNKTTGNTDKRAFVETWQSFYRKKLKEVWKPAV

SEQ ID NO: 585 - protein, 979 aa, synthetic construct; identical to SEQ ID NO: 433
  REGION 1..979: note = CasX variant

SEQ ID NO: 586 - protein, 979 aa, synthetic construct
  REGION 1..979: note = CasX variant
QEIKRINKIRRRLVKDSNTKKAGKTRGPMKTLLVRVMTPDLRERLENLRKKPENIPQPISNTSRANLNKLLTDYTEMKKAILHVYWEEFQKDPVGLMSRVAQPASKKIDQNKLKPEMDEKGNLTTAGFACSQCGQPLFVYKLEQVSEKGKAYTNYFGRCNVAEHEKLILLAQLKPEKDSDEAVTYSLGKFGQRALDFYSIHVTKESTHPVKPLAQIAGNRYASHPVGKALSDACMGTIASFLSKYQDIIIEHQKVVKGNQKRLESLRELAGKENLEYPSVTLPPQPHTKEGVDAYNEVIARVRMWVNLNLWQKLKLSRDDAKPLLRLKGFPSFPLVERQANEVDWWDMVCNVKKLINEKKEDGKVFWQNLAGYKRQEALRPYLSSEEDRKKGKKFARYQLGDLLLHLEKKHGEDWGKVYDEAWERIDKKVEGLSKHIKLEEERRSEDAQSKAALTDWLRAKASFVIEGLKEADKDEFCRCELKLQKWYGDLRGKPFAIEAENSILDISGFSKQYNCAFIWQKDGVKKLNLYLIINYFKGGKLRFKKIKPEAFEANRFYTVINKKSGEIVPMEVNFNFDDPNLIILPLAFGKRQGREFIWNDLLSLETGSLKLANGRVIEKTLYNRRTRQDEPALFVALTFERREVLDSSNIKPMNLIGVDRGENIPAVIALTDPEGCPLSRFKDSLGNPTHILRIGESYKEKQRTIQAKKEVEQRRAGGYSRKYASKAKNLADDMVRNTARDLLYYAVTQDAMLIFENLSRGFGRQGKRTFMAERQYTRMEDWLTAKLAYEGLPSKTYLSKTLAQYTSKTCSNCGFTITSADYDRVLEKLKKTATGWMTTINGKELKVEGQITYYNRYKRQNVVKDLSVELDRLSEESVNNDISSWTKGRSGEALSLLKKRFSHRPVQEKFVCLNCGFETHADEQAALNIARSWLFLRSQEYKKYQTNKTTGNTDKRAFVETWQSFYRKKLKEVWKPAV

SEQ ID NO: 587 - protein, 978 aa, synthetic construct; identical to SEQ ID NO: 96
  REGION 1..978: note = CasX variant

SEQ ID NO: 588 - protein, 978 aa, synthetic construct
  REGION 1..978: note = CasX variant
QEIKRINKIRRRLVKDSNTKKAGKTGPMKTLLVRVMTPDLRERLENLRKKPENIPQPISNTSRANLNKLLTDYTEMKKAILHVYWEEFQKDPVGLMSRVAQPASKKIDQNKLKPEMDEKGNLTTAGFACSQCGQPLFVYKLEQVSEKGKAYTNYFGRCNVAEHEKLIKLAQLKPEKDSDEAVTYSLGKFGQRALDFYSIHVTKESTHPVKPLAQIAGNRYASYPVGKALSDACMGTIASFLSKYQDIIIEHQKVVKGNQKRLESLRELAGKENLEYPSVTLPPQPHTKEGVDAYNEVIARVRMWVNLNLWQKLKLSRDDAKPLLRLKGFPSFPLVERQANEVDWWDMVCNVKKLINEKKEDGKVFWQNLAGYKRQEALRPYLSSEEDRKKGKKFARYQLGDLLLHLEKKHGEDWGKVYDEAWERIDKKVEGLSKHIKLEEERRSEDAQSKAALTDWLRAKASFVIEGLKEADKDEFCRCELKLQKWYGDLRGKPFAIEAENSILDISGFSKQYNCAFIWQKDGVKKLNLYLIINYFKGGKLRFKKIKPEAFEANRFYTVINKKSGEIVPMEVNFNFDDPNLIILPLAFGKRQGREFIWNDLLSLETGSLKLANGRVIEKTLYNRRTRQDEPALFVALTFERREVLDSSNIKPMNLIGVDRGENIPAVIALTDPEGCPLSRFKDSLGNPTHILRIGESYKEKQRTIQAKKEVEQRRAGGYSRKYASKAKNLADDMVRNTARDLLYYAVTQDAMLIFENLSRGFGRQGKRTFMAERQYTRMEDWLTAKLAYEGLPSKTYLSKTLAQYTSKTCSNCGFTITSADYDRVLEKLKKTATGWMTTINGKELKVEGQITYYNRYKRQNVVKDLSVELDRLSEESVNNDISSWTKGRSGEALSLLKKRFSHRPVQEKFVCLNCGFETHADEQAALNIARSWLFLRSQEYKKYQTNKTTGNTDKRAFVETWQSFYRKKLKEVWKPAV

SEQ ID NO: 589 - protein, 978 aa, synthetic construct
  REGION 1..978: note = CasX variant
QEIKRINKIRRRLVKDSNTKKAGKTGPMKTLLVRVMTPDLRERLENLRKKPENIPQPISNTSRANLNKLLTDYTEMKKAILHVYWEEFQKDPVGLMSRVAQPASKKIDQNKLKPEMDEKGNLTTAGFACSQCGQPLFVYKLEQVSEKGKAYTNYFGRCNVAEHEKLIKLAQLKPEKDSDEAVTYSLGKFGQRALDFYSIHVTKESTHPVKPLAQIAGNRYASHPVGKALSDACMGTIASFLSKYQDIIIEHQKVVKGNQKRLESLRELAGKENLEYPSVTLPPQPHTKEGVDAYNEVIARVRMWVNLNLWQKLKLSRDDAKPLLRLKGFPSFPLVERQANEVDWWDMVCNVKKLINEKKEDGKVFWQNLAGYKRQEALRPYLSSEEDRKKGKKFARYQLGDLLLHLEKKHGEDWGKVYDEAWERIDKKVEGLSKHIKLEEERRSEDAQSKAALTDWLRAKASFVIEGLKEADKDEFCRCELKLQKWYGDLRGKPFAIEAENSILDISGFSKQYNCAFIWQKDGVKKLNLYLIINYFKGGKLRFKKIKPEAFEANRFYTVINKKSGEIVPMEVNFNFDDPNLIILPLAFGKRQGREFIWNDLLSLETGSLKLANGRVIEKTLYNRRTRQDEPALFVALTFERREVLDSSNIKPMNLIGVDRGENIPAVIALTDPEGCPLSRFKDSLGNPTHILRIGESYKEKQRTIQAKKEVEQRRAGGYSRKYASKAKNLADDMVRNTARDLLYYAVTQDAMLIFENLSRGFGRQGKRTFMAERQYTRMEDWLTAKLAYEGLPSKTYLSKTLAQYTSKTCSNCGFTITSADYDRVLEKLKKTATGWMTTINGKELKVEGQITYYNRYKRQNVVKDLSVELDRLSEESVNNDISSWTKGRSGEALSLLKKRFSHRPVQEKFVCLNCGFETHADEQAALNIARSWLFLRSQEYKKYQTNKTTGNTDKRAFVETWQSFYRKKLKEVWKPAV

SEQ ID NO: 590 - protein, 979 aa, synthetic construct
  REGION 1..979: note = CasX variant
QEIKRINKIRRRLVKDSNTKKAGKTRGPMKTLLVRVMTPDLRERLENLRKKPENIPQPISNTSRANLNKLLTDYTEMKKAILHVYWEEFQKDPVGLMSRVAQPASKKIDQNKLKPEMDEKGNLTTAGFACSQCGQPLFVYKLEQVSEKGKAYTNYFGRCNVAEHEKLIKLAQLKPEKDSDEAVTYSLGKFGQRALDFYSIHVTKESTHPVKPLAQIAGNRYASYPVGKALSDACMGTIASFLSKYQDIIIEHQKVVKGNQKRLESLRELAGKENLEYPSVTLPPQPHTKEGVDAYNEVIARVRMWVNLNLWQKLKLSRDDAKPLLRLKGFPSFPLVERQANEVDWWDMVCNVKKLINEKKEDGKVFWQNLAGYKRQEALRPYLSSEEDRKKGKKFARYQLGDLLLHLEKKHGEDWGKVYDEAWERIDKKVEGLSKHIKLEEERRSEDAQSKAALTDWLRAKASFVIEGLKEADKDEFCRCELKLQKWYGDLRGKPFAIEAENSILDISGFSKQYNCAFIWQKDGVKKLNLYLIINYFKGGKLRFKKIKPEAFEANRFYTVINKKSGEIVPMEVNFNFDDPNLIILPLAFGKRQGREFIWNDLLSLETGSLKLANGRVIEKTLYNRRTRQDEPALFVALTFERREVLDSSNIKPMNLIGVDRGENIPAVIALTDPEGCPLSRFKDSLGNPTHILRIGESYKEKQRTIQAKKEVEQRRAGGYSRKYASKAKNLADDMVRNTARDLLYYAVTQDAMLIFENLSRGFGRQGKRTFMAERQYTRMEDWLTAKLAYEGLPSKTYLSKTLAQYTSKTCSNCGFTITSADYDRVLEKLKKTATGWMTTINGKELKVEGQITYYNRYKRQNVVKDLSVELDRLSEESVNNDISSWTKGRSGEALSLLKKRFSHRPVQEKFVCLNCGFETHADEQAALNIARSWLFLRSQEYKKYQTNKTTGNTDKRAFVETWQSFYRKKLKEVWKPAV

SEQ ID NO: 591 - protein, 979 aa, synthetic construct
  REGION 1..979: note = CasX variant
QEIKRINKIRRRLVKDSNTKKAGKTRGPMKTLLVRVMTPDLRERLENLRKKPENIPQPISNTSRANLNKLLTDYTEMKKAILHVYWEEFQKDPVGLMSRVAQPASKKIDQNKLKPEMDEKGNLTTAGFACSQCGQPLFVYKLEQVSEKGKAYTNYFGRCNVAEHEKLIKLAQLKPEKDSDEAVTYSLGKFGQRALDFYSIHVTKESTHPVKPLAQIAGNRYASHPVGKALSDACMGTIASFLSKYQDIIIEHQKVVKGNQKRLESLRELAGKENLEYPSVTLPPQPHTKEGVDAYNEVIARVRMWVNLNLWQKLKLSRDDAKPLLRLKGFPSFPLVERQANEVDWWDMVCNVKKLINEKKEDGKVFWQNLAGYKRQEALRPYLSSEEDRKKGKKFARYQLGDLLLHLEKKHGEDWGKVYDEAWERIDKKVEGLSKHIKLEEERRSEDAQSKAALTDWLRAKASFVIEGLKEADKDEFCRCELKLQKWYGDLRGKPFAIEAENSILDISGFSKQYNCAFIWQKDGVKKLNLYLIINYFKGGKLRFKKIKPEAFEANRFYTVINKKSGEIVPMEVNFNFDDPNLIILPLAFGKRQGREFIWNDLLSLETGSLKLANGRVIEKTLYNRRTRQDEPALFVALTFERREVLDSSNIKPMNLIGVDRGENIPAVIALTDPEGCPLSRFKDSLGNPTHILRIGESYKEKQRTIQAKKEVEQRRAGGYSRKYASKAKNLADDMVRNTARDLLYYAVTQDAMLIFENLSRGFGRQGKRTFMAERQYTRMEDWLTAKLAYEGLPSKTYLSKTLAQYTSKTCSNCGFTITSADYDRVLEKLKKTATGWMTTINGKELKVEGQITYYNRYKRQNVVKDLSVELDRLSEESVNNDISSWTKGRSGEALSLLKKRFSHRPVQEKFVCLNCGFETHADEQAALNIARSWLFLRSQEYKKYQTNKTTGNTDKRAFVETWQSFYRKKLKEVWKPAV

SEQ ID NO: 592 - protein, 978 aa, synthetic construct
  REGION 1..978: note = CasX variant
QEIKRINKIRRRLVKDSNTKKAGKTGPMKTLLVRVMTPDLRERLENLRKKPENIPQPISNTSRANLNKLLTDYTEMKKAILHVYWEEFQKDPVGLMSRVAQPASKKIDQNKLKPEMDEKGNLTTAGFACSQCGQPLFVYKLEQVSEKGKAYTNYFGRCNVAEHEKLIKLAQLKPEKDSDEAVTYSLGKFGQRALDFYSIHVTKESTHPVKPLAQIAGNRYASHPVGKALSGACMGTIASFLSKYQDIIIEHQKVVKGNQKRLESLRELAGKENLEYPSVTLPPQPHTKEGVDAYNEVIARVRMWVNLNLWQKLKLSRDDAKPLLRLKGFPSFPLVERQANEVDWWDMVCNVKKLINEKKEDGKVFWQNLAGYKRQEALRPYLSSEEDRKKGKKFARYQLGDLLLHLEKKHGEDWGKVYDEAWERIDKKVEGLSKHIKLEEERRSEDAQSKAALTDWLRAKASFVIEGLKEADKDEFCRCELKLQKWYGDLRGKPFAIEAENSILDISGFSKQYNCAFIWQKDGVKKLNLYLIINYFKGGKLRFKKIKPEAFEANRFYTVINKKSGEIVPMEVNFNFDDPNLIILPLAFGKRQGREFIWNDLLSLETGSLKLANGRVIEKTLYNRRTRQDEPALFVALTFERREVLDSSNIKPMNLIGVDRGENIPAVIALTDPEGCPLSRFKDSLGNPTHILRIGESYKEKQRTIQAKKEVEQRRAGGYSRKYASKAKNLADDMVRNTARDLLYYAVTQDAMLIFENLSRGFGRQGKRTFMAERQYTRMEDWLTAKLAYEGLPSKTYLSKTLAQYTSKTCSNCGFTITSADYDRVLEKLKKTATGWMTTINGKELKVEGQITYYNRYKRQNVVKDLSVELDRLSEESVNNDISSWTKGRSGEALSLLKKRFSHRPVQEKFVCLNCGFETHADEQAALNIARSWLFLRSQEYKKYQTNKTTGNTDKRAFVETWQSFYRKKLKEVWKPAV

SEQ ID NO: 593 - DNA, 64 bp, synthetic construct
  misc_feature 1..64: note = PCR2_Rvs_v1_002
  source 1..64: mol_type = other DNA
caagcagaagacggcatacgagatacatcggtgactggagttcagacgtgtgctcttccgatct

SEQ ID NO: 594 - DNA, 64 bp, synthetic construct
  misc_feature 1..64: note = PCR2_Rvs_v1_003
  source 1..64: mol_type = other DNA
caagcagaagacggcatacgagatgcctaagtgactggagttcagacgtgtgctcttccgatct

SEQ ID NO: 595 - DNA, 64 bp, synthetic construct
  misc_feature 1..64: note = PCR2_Rvs_v1_004
  source 1..64: mol_type = other DNA
caagcagaagacggcatacgagattggtcagtgactggagttcagacgtgtgctcttccgatct

SEQ ID NO: 596 - DNA, 64 bp, synthetic construct
  misc_feature 1..64: note = PCR2_Rvs_v1_005
  source 1..64: mol_type = other DNA
caagcagaagacggcatacgagatcactgtgtgactggagttcagacgtgtgctcttccgatct

SEQ ID NO: 597 - DNA, 64 bp, synthetic construct
  misc_feature 1..64: note = PCR2_Rvs_v1_006
  source 1..64: mol_type = other DNA
caagcagaagacggcatacgagatattggcgtgactggagttcagacgtgtgctcttccgatct

SEQ ID NO: 598 - DNA, 64 bp, synthetic construct
  misc_feature 1..64: note = PCR2_Rvs_v1_007
  source 1..64: mol_type = other DNA
caagcagaagacggcatacgagatgatctggtgactggagttcagacgtgtgctcttccgatct

SEQ ID NO: 599 - DNA, 64 bp, synthetic construct
  misc_feature 1..64: note = PCR2_Rvs_v1_008
  source 1..64: mol_type = other DNA
caagcagaagacggcatacgagattcaagtgtgactggagttcagacgtgtgctcttccgatct

SEQ ID NO: 600 - DNA, 64 bp, synthetic construct
  misc_feature 1..64: note = PCR2_Rvs_v1_009
  source 1..64: mol_type = other DNA
caagcagaagacggcatacgagatctgatcgtgactggagttcagacgtgtgctcttccgatct

SEQ ID NO: 601 - DNA, 64 bp, synthetic construct
  misc_feature 1..64: note = PCR2_Rvs_v1_010
  source 1..64: mol_type = other DNA
caagcagaagacggcatacgagataagctagtgactggagttcagacgtgtgctcttccgatct

SEQ ID NO: 602 - DNA, 64 bp, synthetic construct
  misc_feature 1..64: note = PCR2_Rvs_v1_011
  source 1..64: mol_type = other DNA
caagcagaagacggcatacgagatgtagccgtgactggagttcagacgtgtgctcttccgatct

SEQ ID NO: 603 - DNA, 64 bp, synthetic construct
  misc_feature 1..64: note = PCR2_Rvs_v1_012
  source 1..64: mol_type = other DNA
caagcagaagacggcatacgagattacaaggtgactggagttcagacgtgtgctcttccgatct

SEQ ID NO: 604 - DNA, 64 bp, synthetic construct
  misc_feature 1..64: note = PCR2_Rvs_v1_013
  source 1..64: mol_type = other DNA
caagcagaagacggcatacgagatttgactgtgactggagttcagacgtgtgctcttccgatct

SEQ ID NO: 605 - DNA, 64 bp, synthetic construct
  misc_feature 1..64: note = PCR2_Rvs_v1_014
  source 1..64: mol_type = other DNA
caagcagaagacggcatacgagatggaactgtgactggagttcagacgtgtgctcttccgatct

SEQ ID NO: 606 - DNA, 64 bp, synthetic construct
  misc_feature 1..64: note = PCR2_Rvs_v1_015
  source 1..64: mol_type = other DNA
caagcagaagacggcatacgagattgacatgtgactggagttcagacgtgtgctcttccgatct

SEQ ID NO: 607 - DNA, 64 bp, synthetic construct
  misc_feature 1..64: note = PCR2_Rvs_v1_016
  source 1..64: mol_type = other DNA
caagcagaagacggcatacgagatggacgggtgactggagttcagacgtgtgctcttccgatct

SEQ ID NO: 608 - DNA, 64 bp, synthetic construct
  misc_feature 1..64: note = PCR2_Rvs_v1_017
  source 1..64: mol_type = other DNA
caagcagaagacggcatacgagatctctacgtgactggagttcagacgtgtgctcttccgatct

SEQ ID NO: 609 - DNA, 64 bp, synthetic construct
  misc_feature 1..64: note = PCR2_Rvs_v1_018
  source 1..64: mol_type = other DNA
caagcagaagacggcatacgagatgcggacgtgactggagttcagacgtgtgctcttccgatct

SEQ ID NO: 610 - DNA, 64 bp, synthetic construct
  misc_feature 1..64: note = PCR2_Rvs_v1_019
  source 1..64: mol_type = other DNA
caagcagaagacggcatacgagattttcacgtgactggagttcagacgtgtgctcttccgatct

SEQ ID NO: 611 - DNA, 64 bp, synthetic construct
  misc_feature 1..64: note = PCR2_Rvs_v1_020
  source 1..64: mol_type = other DNA
caagcagaagacggcatacgagatggccacgtgactggagttcagacgtgtgctcttccgatct

SEQ ID NO: 612 - DNA, 64 bp, synthetic construct
  misc_feature 1..64: note = PCR2_Rvs_v1_021
  source 1..64: mol_type = other DNA
caagcagaagacggcatacgagatcgaaacgtgactggagttcagacgtgtgctcttccgatct

SEQ ID NO: 613 - DNA, 64 bp, synthetic construct
  misc_feature 1..64: note = PCR2_Rvs_v1_022
  source 1..64: mol_type = other DNA
caagcagaagacggcatacgagatcgtacggtgactggagttcagacgtgtgctcttccgatct

SEQ ID NO: 614 - DNA, 64 bp, synthetic construct
  misc_feature 1..64: note = PCR2_Rvs_v1_023
  source 1..64: mol_type = other DNA
caagcagaagacggcatacgagatccactcgtgactggagttcagacgtgtgctcttccgatct

SEQ ID NO: 615 - DNA, 64 bp, synthetic construct
  misc_feature 1..64: note = PCR2_Rvs_v1_024
  source 1..64: mol_type = other DNA
caagcagaagacggcatacgagatgctaccgtgactggagttcagacgtgtgctcttccgatct

SEQ ID NO: 616 - DNA, 64 bp, synthetic construct
  misc_feature 1..64: note = PCR2_Rvs_v1_025
  source 1..64: mol_type = other DNA
caagcagaagacggcatacgagatatcagtgtgactggagttcagacgtgtgctcttccgatct

SEQ ID NO: 617 - DNA, 64 bp, synthetic construct
  misc_feature 1..64: note = PCR2_Rvs_v1_026
  source 1..64: mol_type = other DNA
caagcagaagacggcatacgagatgctcatgtgactggagttcagacgtgtgctcttccgatct

SEQ ID NO: 618 - DNA, 64 bp, synthetic construct
  misc_feature 1..64: note = PCR2_Rvs_v1_027
  source 1..64: mol_type = other DNA
caagcagaagacggcatacgagataggaatgtgactggagttcagacgtgtgctcttccgatct

SEQ ID NO: 619 - DNA, 64 bp, synthetic construct
  misc_feature 1..64: note = PCR2_Rvs_v1_028
  source 1..64: mol_type = other DNA
caagcagaagacggcatacgagatcttttggtgactggagttcagacgtgtgctcttccgatct

SEQ ID NO: 620 - DNA, 64 bp, synthetic construct
  misc_feature 1..64: note = PCR2_Rvs_v1_029
  source 1..64: mol_type = other DNA
caagcagaagacggcatacgagattagttggtgactggagttcagacgtgtgctcttccgatct

SEQ ID NO: 621 - DNA, 64 bp, synthetic construct
  misc_feature 1..64: note = PCR2_Rvs_v1_030
  source 1..64: mol_type = other DNA
caagcagaagacggcatacgagatccggtggtgactggagttcagacgtgtgctcttccgatct

SEQ ID NO: 622 - DNA, 64 bp, synthetic construct
  misc_feature 1..64: note = PCR2_Rvs_v1_031
  source 1..64: mol_type = other DNA
caagcagaagacggcatacgagatatcgtggtgactggagttcagacgtgtgctcttccgatct

SEQ ID NO: 623 - DNA, 64 bp, synthetic construct
  misc_feature 1..64: note = PCR2_Rvs_v1_032
  source 1..64: mol_type = other DNA
caagcagaagacggcatacgagattgagtggtgactggagttcagacgtgtgctcttccgatct

SEQ ID NO: 624 - DNA, 64 bp, synthetic construct
  misc_feature 1..64: note = PCR2_Rvs_v1_033
  source 1..64: mol_type = other DNA
caagcagaagacggcatacgagatcgcctggtgactggagttcagacgtgtgctcttccgatct

SEQ ID NO: 625 - DNA, 64 bp, synthetic construct
  misc_feature 1..64: note = PCR2_Rvs_v1_034
  source 1..64: mol_type = other DNA
caagcagaagacggcatacgagatgccatggtgactggagttcagacgtgtgctcttccgatct

SEQ ID NO: 626 - DNA, 64 bp, synthetic construct
  misc_feature 1..64: note = PCR2_Rvs_v1_035
  source 1..64: mol_type = other DNA
caagcagaagacggcatacgagataaaatggtgactggagttcagacgtgtgctcttccgatct

SEQ ID NO: 627 - DNA, 64 bp, synthetic construct
  misc_feature 1..64: note = PCR2_Rvs_v1_036
  source 1..64: mol_type = other DNA
caagcagaagacggcatacgagattgttgggtgactggagttcagacgtgtgctcttccgatct

SEQ ID NO: 628 - DNA, 64 bp, synthetic construct
  misc_feature 1..64: note = PCR2_Rvs_v1_037
  source 1..64: mol_type = other DNA
caagcagaagacggcatacgagatattccggtgactggagttcagacgtgtgctcttccgatct

SEQ ID NO: 629 - DNA, 64 bp, synthetic construct
  misc_feature 1..64: note = PCR2_Rvs_v1_038
  source 1..64: mol_type = other DNA
caagcagaagacggcatacgagatagctaggtgactggagttcagacgtgtgctcttccgatct

SEQ ID NO: 630 - DNA, 64 bp, synthetic construct
  misc_feature 1..64: note = PCR2_Rvs_v1_039
  source 1..64: mol_type = other DNA
caagcagaagacggcatacgagatgtataggtgactggagttcagacgtgtgctcttccgatct

SEQ ID NO: 631 - DNA, 64 bp, synthetic construct
  misc_feature 1..64: note = PCR2_Rvs_v1_040
  source 1..64: mol_type = other DNA
caagcagaagacggcatacgagattctgaggtgactggagttcagacgtgtgctcttccgatct

SEQ ID NO: 632 - DNA, 64 bp, synthetic construct
  misc_feature 1..64: note = PCR2_Rvs_v1_041
  source 1..64: mol_type = other DNA
caagcagaagacggcatacgagatgtcgtcgtgactggagttcagacgtgtgctcttccgatct

SEQ ID NO: 633 - DNA, 64 bp, synthetic construct
  misc_feature 1..64: note = PCR2_Rvs_v1_042
  source 1..64: mol_type = other DNA
caagcagaagacggcatacgagatcgattagtgactggagttcagacgtgtgctcttccgatct

SEQ ID NO: 634 - DNA, 64 bp, synthetic construct
  misc_feature 1..64: note = PCR2_Rvs_v1_043
  source 1..64: mol_type = other DNA
caagcagaagacggcatacgagatgctgtagtgactggagttcagacgtgtgctcttccgatct

SEQ ID NO: 635 - DNA, 64 bp, synthetic construct
  misc_feature 1..64: note = PCR2_Rvs_v1_044
  source 1..64: mol_type = other DNA
caagcagaagacggcatacgagatattatagtgactggagttcagacgtgtgctcttccgatct

SEQ ID NO: 636 - DNA, 64 bp, synthetic construct
  misc_feature 1..64: note = PCR2_Rvs_v1_045
  source 1..64: mol_type = other DNA
caagcagaagacggcatacgagatgaatgagtgactggagttcagacgtgtgctcttccgatct

SEQ ID NO: 637 - DNA, 64 bp, synthetic construct
  misc_feature 1..64: note = PCR2_Rvs_v1_046
  source 1..64: mol_type = other DNA
caagcagaagacggcatacgagattcgggagtgactggagttcagacgtgtgctcttccgatct

SEQ ID NO: 638 - DNA, 64 bp, synthetic construct
  misc_feature 1..64: note = PCR2_Rvs_v1_047
  source 1..64: mol_type = other DNA
caagcagaagacggcatacgagatcttcgagtgactggagttcagacgtgtgctcttccgatct

SEQ ID NO: 639 - DNA, 64 bp, synthetic construct
  misc_feature 1..64: note = PCR2_Rvs_v1_048
  source 1..64: mol_type = other DNA
caagcagaagacggcatacgagattgccgagtgactggagttcagacgtgtgctcttccgatct

SEQ ID NO: 640 - DNA, 61 bp, synthetic construct
  misc_feature 1..61: note = PCR2_Rvs_v2_001
  source 1..61: mol_type = other DNA
caagcagaagacggcatacgagataaccgcgggtgactggagttcagacgtgtgctcttcc

SEQ ID NO: 641 - DNA, 61 bp, synthetic construct
  misc_feature 1..61: note = PCR2_Rvs_v2_002
  source 1..61: mol_type = other DNA
caagcagaagacggcatacgagatggttataagtgactggagttcagacgtgtgctcttcc

SEQ ID NO: 642 - DNA, 61 bp, synthetic construct
  misc_feature 1..61: note = PCR2_Rvs_v2_003
  source 1..61: mol_type = other DNA
caagcagaagacggcatacgagatccaagtccgtgactggagttcagacgtgtgctcttcc

SEQ ID NO: 643 - DNA, 61 bp, synthetic construct
  misc_feature 1..61: note = PCR2_Rvs_v2_004
  source 1..61: mol_type = other DNA
caagcagaagacggcatacgagatttggacttgtgactggagttcagacgtgtgctcttcc

SEQ ID NO: 644 - DNA, 61 bp, synthetic construct
  misc_feature 1..61: note = PCR2_Rvs_v2_005
  source 1..61: mol_type = other DNA
caagcagaagacggcatacgagatcagtggatgtgactggagttcagacgtgtgctcttcc

SEQ ID NO: 645 - DNA, 61 bp, synthetic construct
  misc_feature 1..61: note = PCR2_Rvs_v2_006
  source 1..61: mol_type = other DNA
caagcagaagacggcatacgagattgacaagcgtgactggagttcagacgtgtgctcttcc

SEQ ID NO: 646 - DNA, 61 bp, synthetic construct
  misc_feature 1..61: note = PCR2_Rvs_v2_007
  source 1..61: mol_type = other DNA
caagcagaagacggcatacgagatctagcttggtgactggagttcagacgtgtgctcttcc

SEQ ID NO: 647 - DNA, 61 bp, synthetic construct
  misc_feature 1..61: note = PCR2_Rvs_v2_008
  source 1..61: mol_type = other DNA
caagcagaagacggcatacgagattcgatccagtgactggagttcagacgtgtgctcttcc

SEQ ID NO: 648 - DNA, 61 bp, synthetic construct
  misc_feature 1..61: note = PCR2_Rvs_v2_009
  source 1..61: mol_type = other DNA
caagcagaagacggcatacgagatcctgaactgtgactggagttcagacgtgtgctcttcc

SEQ ID NO: 649 - DNA, 61 bp, synthetic construct
  misc_feature 1..61: note = PCR2_Rvs_v2_010
  source 1..61: mol_type = other DNA
caagcagaagacggcatacgagatttcaggtcgtgactggagttcagacgtgtgctcttcc

SEQ ID NO: 650 - DNA, 61 bp, synthetic construct
  misc_feature 1..61: note = PCR2_Rvs_v2_011
  source 1..61: mol_type = other DNA
caagcagaagacggcatacgagatagtagagagtgactggagttcagacgtgtgctcttcc

SEQ ID NO: 651 - DNA, 61 bp, synthetic construct
  misc_feature 1..61: note = PCR2_Rvs_v2_012
  source 1..61: mol_type = other DNA
caagcagaagacggcatacgagatgacgagaggtgactggagttcagacgtgtgctcttcc

SEQ ID NO: 652 - DNA, 61 bp, synthetic construct
  misc_feature 1..61: note = PCR2_Rvs_v2_013
  source 1..61: mol_type = other DNA
caagcagaagacggcatacgagatagacttgggtgactggagttcagacgtgtgctcttcc

SEQ ID NO: 653 - DNA, 61 bp, synthetic construct
  misc_feature 1..61: note = PCR2_Rvs_v2_014
  source 1..61: mol_type = other DNA
caagcagaagacggcatacgagatgagtccaagtgactggagttcagacgtgtgctcttcc

SEQ ID NO: 654 - DNA, 61 bp, synthetic construct
  misc_feature 1..61: note = PCR2_Rvs_v2_015
  source 1..61: mol_type = other DNA
caagcagaagacggcatacgagatcttaagccgtgactggagttcagacgtgtgctcttcc

SEQ ID NO: 655 - DNA, 61 bp, synthetic construct
  misc_feature 1..61: note = PCR2_Rvs_v2_016
  source 1..61: mol_type = other DNA
caagcagaagacggcatacgagattccggattgtgactggagttcagacgtgtgctcttcc

SEQ ID NO: 656 - DNA, 61 bp, synthetic construct
  misc_feature 1..61: note = PCR2_Rvs_v2_017
  source 1..61: mol_type = other DNA
caagcagaagacggcatacgagatctgtattagtgactggagttcagacgtgtgctcttcc

SEQ ID NO: 657 - DNA, 61 bp, synthetic construct
  misc_feature 1..61: note = PCR2_Rvs_v2_018
  source 1..61: mol_type = other DNA
caagcagaagacggcatacgagattcacgccggtgactggagttcagacgtgtgctcttcc

SEQ ID NO: 658 - DNA, 61 bp, synthetic construct
  misc_feature 1..61: note = PCR2_Rvs_v2_019
  source 1..61: mol_type = other DNA
caagcagaagacggcatacgagatacttacatgtgactggagttcagacgtgtgctcttcc

SEQ ID NO: 659 - DNA, 61 bp, synthetic construct
  misc_feature 1..61: note = PCR2_Rvs_v2_020
  source 1..61: mol_type = other DNA
caagcagaagacggcatacgagatgtccgtgcgtgactggagttcagacgtgtgctcttcc

SEQ ID NO: 660 - DNA, 61 bp, synthetic construct
  misc_feature 1..61: note = PCR2_Rvs_v2_021
  source 1..61: mol_type = other DNA
caagcagaagacggcatacgagataaggtaccgtgactggagttcagacgtgtgctcttcc

SEQ ID NO: 661 - DNA, 61 bp, synthetic construct
  misc_feature 1..61: note = PCR2_Rvs_v2_022
  source 1..61: mol_type = other DNA
caagcagaagacggcatacgagatggaacgttgtgactggagttcagacgtgtgctcttcc

SEQ ID NO: 662 - DNA, 61 bp, synthetic construct
  misc_feature 1..61: note = PCR2_Rvs_v2_023
  source 1..61: mol_type = other DNA
caagcagaagacggcatacgagataattctgcgtgactggagttcagacgtgtgctcttcc

SEQ ID NO: 663 - DNA, 61 bp, synthetic construct
  misc_feature 1..61: note = PCR2_Rvs_v2_024
  source 1..61: mol_type = other DNA
caagcagaagacggcatacgagatggcctcatgtgactggagttcagacgtgtgctcttcc

SEQ ID NO: 664 - DNA, 61 bp, synthetic construct
  misc_feature 1..61: note = PCR2_Rvs_v2_025
  source 1..61: mol_type = other DNA
caagcagaagacggcatacgagatatcttagtgtgactggagttcagacgtgtgctcttcc

SEQ ID NO: 665 - DNA, 61 bp, synthetic construct
  misc_feature 1..61: note = PCR2_Rvs_v2_026
  source 1..61: mol_type = other DNA
caagcagaagacggcatacgagatgctccgacgtgactggagttcagacgtgtgctcttcc

SEQ ID NO: 666 - DNA, 61 bp, synthetic construct
  misc_feature 1..61: note = PCR2_Rvs_v2_027
  source 1..61: mol_type = other DNA
caagcagaagacggcatacgagatataccaaggtgactggagttcagacgtgtgctcttcc

SEQ ID NO: 667 - DNA, 61 bp, synthetic construct
  misc_feature 1..61: note = PCR2_Rvs_v2_028
  source 1..61: mol_type = other DNA
caagcagaagacggcatacgagatgcgttggagtgactggagttcagacgtgtgctcttcc

SEQ ID NO: 668 - DNA, 61 bp, synthetic construct
  misc_feature 1..61: note = PCR2_Rvs_v2_029
  source 1..61: mol_type = other DNA
caagcagaagacggcatacgagatcttcacgggtgactggagttcagacgtgtgctcttcc

SEQ ID NO: 669 - DNA, 61 bp, synthetic construct
  misc_feature 1..61: note = PCR2_Rvs_v2_030
  source 1..61: mol_type = other DNA
caagcagaagacggcatacgagattcctgtaagtgactggagttcagacgtgtgctcttcc

SEQ ID NO: 670 - DNA, 61 bp, synthetic construct
  misc_feature 1..61: note = PCR2_Rvs_v2_031
  source 1..61: mol_type = other DNA
caagcagaagacggcatacgagatagaatgccgtgactggagttcagacgtgtgctcttcc

SEQ ID NO: 671 - DNA, 61 bp, synthetic construct
  misc_feature 1..61: note = PCR2_Rvs_v2_032
  source 1..61: mol_type = other DNA
caagcagaagacggcatacgagatgaggcattgtgactggagttcagacgtgtgctcttcc

SEQ ID NO: 672 - DNA, 61 bp, synthetic construct
  misc_feature 1..61: note = PCR2_Rvs_v2_033
  source 1..61: mol_type = other DNA
caagcagaagacggcatacgagatcctcggtagtgactggagttcagacgtgtgctcttcc

SEQ ID NO: 673 - DNA, 61 bp, synthetic construct
  misc_feature 1..61: note = PCR2_Rvs_v2_034
  source 1..61: mol_type = other DNA
caagcagaagacggcatacgagatttctaacggtgactggagttcagacgtgtgctcttcc

SEQ ID NO: 674 - DNA, 61 bp, synthetic construct
  misc_feature 1..61: note = PCR2_Rvs_v2_035
  source 1..61: mol_type = other DNA
caagcagaagacggcatacgagatatgaggctgtgactggagttcagacgtgtgctcttcc

SEQ ID NO: 675 - DNA, 61 bp, synthetic construct
  misc_feature 1..61: note = PCR2_Rvs_v2_036
  source 1..61: mol_type = other DNA
caagcagaagacggcatacgagatgcagaatcgtgactggagttcagacgtgtgctcttcc

SEQ ID NO: 676 - DNA, 61 bp, synthetic construct
  misc_feature 1..61: note = PCR2_Rvs_v2_037
  source 1..61: mol_type = other DNA
caagcagaagacggcatacgagatcactacgagtgactggagttcagacgtgtgctcttcc

SEQ ID NO: 677 - DNA, 61 bp, synthetic construct
  misc_feature 1..61: note = PCR2_Rvs_v2_038
  source 1..61: mol_type = other DNA
caagcagaagacggcatacgagattgtcgtaggtgactggagttcagacgtgtgctcttcc

SEQ ID NO: 678 - DNA, 61 bp, synthetic construct
  misc_feature 1..61: note = PCR2_Rvs_v2_039
  source 1..61: mol_type = other DNA
caagcagaagacggcatacgagataccacttagtgactggagttcagacgtgtgctcttcc

SEQ ID NO: 679 - DNA, 61 bp, synthetic construct
  misc_feature 1..61: note = PCR2_Rvs_v2_040
  source 1..61: mol_type = other DNA
caagcagaagacggcatacgagatgttgtccggtgactggagttcagacgtgtgctcttcc

SEQ ID NO: 680 - DNA, 61 bp, synthetic construct
  misc_feature 1..61: note = PCR2_Rvs_v2_041
  source 1..61: mol_type = other DNA
caagcagaagacggcatacgagatatccatatgtgactggagttcagacgtgtgctcttcc

SEQ ID NO: 681 - DNA, 61 bp, synthetic construct
  misc_feature 1..61: note = PCR2_Rvs_v2_042
  source 1..61: mol_type = other DNA
caagcagaagacggcatacgagatgcttgcgcgtgactggagttcagacgtgtgctcttcc

SEQ ID NO: 682 - DNA, 61 bp, synthetic construct
  misc_feature 1..61: note = PCR2_Rvs_v2_043
  source 1..61: mol_type = other DNA
caagcagaagacggcatacgagatagtatcttgtgactggagttcagacgtgtgctcttcc

SEQ ID NO: 683 - DNA, 61 bp, synthetic construct
  misc_feature 1..61: note = PCR2_Rvs_v2_044
  source 1..61: mol_type = other DNA
caagcagaagacggcatacgagatgacgctccgtgactggagttcagacgtgtgctcttcc

SEQ ID NO: 684 - DNA, 61 bp, synthetic construct
  misc_feature 1..61: note = PCR2_Rvs_v2_045
  source 1..61: mol_type = other DNA
caagcagaagacggcatacgagatcatgccatgtgactggagttcagacgtgtgctcttcc

SEQ ID NO: 685 - DNA, 61 bp, synthetic construct
  misc_feature 1..61: note = PCR2_Rvs_v2_046
  source 1..61: mol_type = other DNA
caagcagaagacggcatacgagattgcattgcgtgactggagttcagacgtgtgctcttcc

SEQ ID NO: 686 - DNA, 61 bp, synthetic construct
  misc_feature 1..61: note = PCR2_Rvs_v2_047
  source 1..61: mol_type = other DNA
caagcagaagacggcatacgagatattggaacgtgactggagttcagacgtgtgctcttcc

SEQ ID NO: 687 - DNA, 61 bp, synthetic construct
  misc_feature 1..61: note = PCR2_Rvs_v2_048
  source 1..61: mol_type = other DNA
caagcagaagacggcatacgagatgccaaggtgtgactggagttcagacgtgtgctcttcc

SEQ ID NO: 688 - DNA, 58 bp, synthetic construct
  misc_feature 1..58: note = PCR2_fwd_v1_univ
  source 1..58: mol_type = other DNA
aatgatacggcgaccaccgagatctacactctttccctacacgacgctcttccgatct

SEQ ID NO: 689 - DNA, 52 bp, synthetic construct; identical to SEQ ID NO: 143
  misc_feature 1..52: note = PCR2_fwd_v2_univ
  source 1..52: mol_type = other DNA

SEQ ID NO: 690 - DNA, 64 bp, synthetic construct
  misc_feature 1..64: note = PCR2_fwd_v2_001
  source 1..64: mol_type = other DNA
aatgatacggcgaccaccgagatctacacagcgctagacactctttccctacacgacgctcttc

SEQ ID NO: 691 - DNA, 64 bp, synthetic construct
  misc_feature 1..64: note = PCR2_fwd_v2_002
  source 1..64: mol_type = other DNA
aatgatacggcgaccaccgagatctacacgatatcgaacactctttccctacacgacgctcttc

SEQ ID NO: 692 - DNA, 64 bp, synthetic construct
  misc_feature 1..64: note = PCR2_fwd_v2_003
  source 1..64: mol_type = other DNA
aatgatacggcgaccaccgagatctacaccgcagacgacactctttccctacacgacgctcttc

SEQ ID NO: 693 - DNA, 64 bp, synthetic construct
  misc_feature 1..64: note = PCR2_fwd_v2_004
  source 1..64: mol_type = other DNA
aatgatacggcgaccaccgagatctacactatgagtaacactctttccctacacgacgctcttc

SEQ ID NO: 694 - DNA, 64 bp, synthetic construct
  misc_feature 1..64: note = PCR2_fwd_v2_005
  source 1..64: mol_type = other DNA
aatgatacggcgaccaccgagatctacacaggtgcgtacactctttccctacacgacgctcttc

SEQ ID NO: 695 - DNA, 64 bp, synthetic construct
  misc_feature 1..64: note = PCR2_fwd_v2_006
  source 1..64: mol_type = other DNA
aatgatacggcgaccaccgagatctacacgaacatacacactctttccctacacgacgctcttc

SEQ ID NO: 696 - DNA, 64 bp, synthetic construct
  misc_feature 1..64: note = PCR2_fwd_v2_007
  source 1..64: mol_type = other DNA
aatgatacggcgaccaccgagatctacacacatagcgacactctttccctacacgacgctcttc

SEQ ID NO: 697 - DNA, 64 bp, synthetic construct
  misc_feature 1..64: note = PCR2_fwd_v2_008
  source 1..64: mol_type = other DNA
aatgatacggcgaccaccgagatctacacgtgcgataacactctttccctacacgacgctcttc

SEQ ID NO: 698 - DNA, 64 bp, synthetic construct
  misc_feature 1..64: note = PCR2_fwd_v2_009
  source 1..64: mol_type = other DNA
aatgatacggcgaccaccgagatctacacccaacagaacactctttccctacacgacgctcttc

SEQ ID NO: 699 - DNA, 64 bp, synthetic construct
  misc_feature 1..64: note = PCR2_fwd_v2_010
  source 1..64: mol_type = other DNA
aatgatacggcgaccaccgagatctacacttggtgagacactctttccctacacgacgctcttc

SEQ ID NO: 700 - DNA, 64 bp, synthetic construct
  misc_feature 1..64: note = PCR2_fwd_v2_011
  source 1..64: mol_type = other DNA
aatgatacggcgaccaccgagatctacaccgcggttcacactctttccctacacgacgctcttc

SEQ ID NO: 701 - DNA, 64 bp, synthetic construct
  misc_feature 1..64: note = PCR2_fwd_v2_012
  source 1..64: mol_type = other DNA
aatgatacggcgaccaccgagatctacactataacctacactctttccctacacgacgctcttc

SEQ ID NO: 702 - DNA, 89 bp, synthetic construct
  misc_feature 1..89: note = guide scaffold sequence
  source 1..89: mol_type = other DNA
actggcgcttttatctgattactttgagagccatcaccagcgactatgtcgtagtgggtaaagctccctcttcggagggagcatcaaag

SEQ ID NO: 703 - DNA, 97 bp, synthetic construct
  misc_feature 1..97: note = guide scaffold sequence
  source 1..97: mol_type = other DNA
actggcacttttatctgattactttgagagccatcaccagcgactatgtcgtatgggtaaagcgcttacggacttcggtccgtaagaagcatcaaag

SEQ ID NO: 704 - DNA, 96 bp, synthetic construct
  misc_feature 1..96: note = guide scaffold sequence
  source 1..96: mol_type = other DNA
actggcacttctatctgattactctgagagccatcaccagcgactatgtcgtatgggtaaagcgcttacggacttcggtccgtaagaagcatcaga

SEQ ID NO: 705 - DNA, 98 bp, synthetic construct
  misc_feature 1..98: note = guide scaffold sequence
  source 1..98: mol_type = other DNA
actggcgcttctatctgattactctgagagccatcaccagcgactatgtcgtatgggtaaagccgcttacggacttcggtccgtaagaggcatcagag

SEQ ID NO: 706 - DNA, 98 bp, synthetic construct
  misc_feature 1..98: note = guide scaffold sequence
  source 1..98: mol_type = other DNA
actggcacttctatctgattactctgagcgccatcaccagcgactatgtcgtatgggtaaagccgcttacggacttcggtccgtaagaggcatcagag

SEQ ID NO: 707 - DNA, 98 bp, synthetic construct
  misc_feature 1..98: note = guide scaffold sequence
  source 1..98: mol_type = other DNA
actggcgcttctatctgattactctgagcgccatcaccagcgactatgtcgtatgggtaaagccgcttacggacttcggtccgtaagaggcatcagag

SEQ ID NO: 708 - DNA, 98 bp, synthetic construct
  misc_feature 1..98: note = guide scaffold sequence
  source 1..98: mol_type = other DNA
actggcgcttctatctgattactctgagcgccatcaccagcgactatgtcgtatgggtaaagcgccttacggacttcggtccgtaaggagcatcagag

SEQ ID NO: 709 - DNA, 99 bp, synthetic construct
  misc_feature 1..99: note = guide scaffold sequence
  source 1..99: mol_type = other DNA
actggcgcttctatctgattactctgagcgccatcaccagcgactatgtcgtagtgggtaaagccgcttacggacttcggtccgtaagaggcatcagag

SEQ ID NO: 710 - DNA, 98 bp, synthetic construct
  misc_feature 1..98: note = guide scaffold sequence
  source 1..98: mol_type = other DNA
acgggactttctatctgattactctgaagtccctcaccagcgactatgtcgtatgggtaaagccgcttacggacttcggtccgtaagaggcatcagag

SEQ ID NO: 711 - DNA, 98 bp, synthetic construct
  misc_feature 1..98: note = guide scaffold sequence
  source 1..98: mol_type = other DNA
acctgtagttctatctgattactctgactacagtcaccagcgactatgtcgtatgggtaaagccgcttacggacttcggtccgtaagaggcatcagag

SEQ ID NO: 712 - DNA, 89 bp, synthetic construct; identical to SEQ ID NO: 702
  misc_feature 1..89: note = guide scaffold sequence
  source 1..89: mol_type = other DNA

SEQ ID NO: 713 - DNA, 97 bp, synthetic construct; identical to SEQ ID NO: 703
  misc_feature 1..97: note = guide scaffold sequence
  source 1..97: mol_type = other DNA

SEQ ID NO: 714 - DNA, 96 bp, synthetic construct; identical to SEQ ID NO: 704
  misc_feature 1..96: note = guide scaffold sequence
  source 1..96: mol_type = other DNA

SEQ ID NO: 715 - DNA, 98 bp, synthetic construct; identical to SEQ ID NO: 705
  misc_feature 1..98: note = guide scaffold sequence
  source 1..98: mol_type = other DNA

SEQ ID NO: 716 - DNA, 98 bp, synthetic construct; identical to SEQ ID NO: 706
  misc_feature 1..98: note = guide scaffold sequence
  source 1..98: mol_type = other DNA

SEQ ID NO: 717 - DNA, 98 bp, synthetic construct; identical to SEQ ID NO: 707
  misc_feature 1..98: note = guide scaffold sequence
  source 1..98: mol_type = other DNA

SEQ ID NO: 718 - DNA, 98 bp, synthetic construct; identical to SEQ ID NO: 708
  misc_feature 1..98: note = guide scaffold sequence
  source 1..98: mol_type = other DNA

SEQ ID NO: 719 - DNA, 99 bp, synthetic construct; identical to SEQ ID NO: 709
  misc_feature 1..99: note = guide scaffold sequence
  source 1..99: mol_type = other DNA

SEQ ID NO: 720 - DNA, 98 bp, synthetic construct; identical to SEQ ID NO: 710
  misc_feature 1..98: note = guide scaffold sequence
  source 1..98: mol_type = other DNA

SEQ ID NO: 721 - DNA, 98 bp, synthetic construct; identical to SEQ ID NO: 711
  misc_feature 1..98: note = guide scaffold sequence
  source 1..98: mol_type = other DNA

SEQ ID NO: 722 - DNA, 89 bp, synthetic construct; identical to SEQ ID NO: 702
  misc_feature 1..89: note = guide scaffold sequence
  source 1..89: mol_type = other DNA

SEQ ID NO: 723 - DNA, 99 bp, synthetic construct; identical to SEQ ID NO: 709
  misc_feature 1..99: note = guide scaffold sequence
  source 1..99: mol_type = other DNA

SEQ ID NO: 724 - DNA, 89 bp, synthetic construct; identical to SEQ ID NO: 702
  misc_feature 1..89: note = guide scaffold sequence
  source 1..89: mol_type = other DNA

SEQ ID NO: 725 - DNA, 99 bp, synthetic construct; identical to SEQ ID NO: 709
  misc_feature 1..99: note = guide scaffold sequence
  source 1..99: mol_type = other DNA

SEQ ID NO: 726 - DNA, 99 bp, synthetic construct; identical to SEQ ID NO: 709
  misc_feature 1..99: note = guide scaffold sequence
  source 1..99: mol_type = other DNA

SEQ ID NO: 727 - DNA, 109 bp, synthetic construct
  misc_feature 1..109: note = gRNA
  source 1..109: mol_type = other DNA
actggcgcttttatctgattactttgagagccatcaccagcgactatgtcgtagtgggtaaagctccctcttcggagggagcatcaaagctgcattctagttgtggttt

SEQ ID NO: 728 - DNA, 117 bp, synthetic construct
  misc_feature 1..117: note = gRNA
  source 1..117: mol_type = other DNA
actggcacttttatctgattactttgagagccatcaccagcgactatgtcgtatgggtaaagcgcttacggacttcggtccgtaagaagcatcaaagctgcattctagttgtggttt

SEQ ID NO: 729 - DNA, 117 bp, synthetic construct
  misc_feature 1..117: note = gRNA
  source 1..117: mol_type = other DNA
actggcacttctatctgattactctgagagccatcaccagcgactatgtcgtatgggtaaagcgcttacggacttcggtccgtaagaagcatcagagctgcattctagttgtggttt

SEQ ID NO: 730 - DNA, 118 bp, synthetic construct
  misc_feature 1..118: note = gRNA
  source 1..118: mol_type = other DNA
actggcgcttctatctgattactctgagagccatcaccagcgactatgtcgtatgggtaaagccgcttacggacttcggtccgtaagaggcatcagagctgcattctagttgtggttt

SEQ ID NO: 731 - DNA, 118 bp, synthetic construct
  misc_feature 1..118: note = gRNA
  source 1..118: mol_type = other DNA
actggcacttctatctgattactctgagcgccatcaccagcgactatgtcgtatgggtaaagccgcttacggacttcggtccgtaagaggcatcagagctgcattctagttgtggttt

SEQ ID NO: 732 - DNA, 118 bp, synthetic construct
  misc_feature 1..118: note = gRNA
  source 1..118: mol_type = other DNA
actggcgcttctatctgattactctgagcgccatcaccagcgactatgtcgtatgggtaaagccgcttacggacttcggtccgtaagaggcatcagagctgcattctagttgtggttt

SEQ ID NO: 733 - DNA, 118 bp, synthetic construct
  misc_feature 1..118: note = gRNA
  source 1..118: mol_type = other DNA
actggcgcttctatctgattactctgagcgccatcaccagcgactatgtcgtatgggtaaagcgccttacggacttcggtccgtaaggagcatcagagctgcattctagttgtggttt

SEQ ID NO: 734 - DNA, 118 bp, synthetic construct
  misc_feature 1..118: note = gRNA
  source 1..118: mol_type = other DNA
actggcgcttctatctgattactctgagcgccatcaccagcgactatgtcgtagtgggtaaagccgcttacggacttcggtccgtaagaggcatcagagctgcattctagttgtggtt

SEQ ID NO: 735 - DNA, 117 bp, synthetic construct
  misc_feature 1..117: note = gRNA
  source 1..117: mol_type = other DNA
acgggactttctatctgattactctgaagtccctcaccagcgactatgtcgtatgggtaaagccgcttacggacttcggtccgtaagaggcatcagagctgcattctagttgtggtt

SEQ ID NO: 736 - DNA, 117 bp, synthetic construct
  misc_feature 1..117: note = gRNA
  source 1..117: mol_type = other DNA
acctgtagttctatctgattactctgactacagtcaccagcgactatgtcgtatgggtaaagccgcttacggacttcggtccgtaagaggcatcagagctgcattctagttgtggtt

SEQ ID NO: 737 - DNA, 109 bp, synthetic construct
  misc_feature 1..109: note = gRNA
  source 1..109: mol_type = other DNA
actggcgcttttatctgattactttgagagccatcaccagcgactatgtcgtagtgggtaaagctccctcttcggagggagcatcaaagaaggggctccgcaccacgcc

SEQ ID NO: 738 - DNA, 117 bp, synthetic construct
  misc_feature 1..117: note = gRNA
  source 1..117: mol_type = other DNA
actggcacttttatctgattactttgagagccatcaccagcgactatgtcgtatgggtaaagcgcttacggacttcggtccgtaagaagcatcaaagaaggggctccgcaccacgcc

SEQ ID NO: 739 - DNA, 116 bp, synthetic construct
  misc_feature 1..116: note = gRNA
  source 1..116: mol_type = other DNA
actggcacttctatctgattactctgagagccatcaccagcgactatgtcgtatgggtaaagcgcttacggacttcggtccgtaagaagcatcagaaaggggctccgcaccacgcc

SEQ ID NO: 740 - DNA, 118 bp, synthetic construct
  misc_feature 1..118: note = gRNA
  source 1..118: mol_type = other DNA
actggcgcttctatctgattactctgagagccatcaccagcgactatgtcgtatgggtaaagccgcttacggacttcggtccgtaagaggcatcagagaaggggctccgcaccacgcc

SEQ ID NO: 741 - DNA, 118 bp, synthetic construct
  misc_feature 1..118: note = gRNA
  source 1..118: mol_type = other DNA
actggcacttctatctgattactctgagcgccatcaccagcgactatgtcgtatgggtaaagccgcttacggacttcggtccgtaagaggcatcagagaaggggctccgcaccacgcc

SEQ ID NO: 742 - DNA, 118 bp, synthetic construct
  misc_feature 1..118: note = gRNA
  source 1..118: mol_type = other DNA
actggcgcttctatctgattactctgagcgccatcaccagcgactatgtcgtatgggtaaagccgcttacggacttcggtccgtaagaggcatcagagaaggggctccgcaccacgcc

SEQ ID NO: 743 - DNA, 118 bp, synthetic construct
  misc_feature 1..118: note = gRNA
  source 1..118: mol_type = other DNA
actggcgcttctatctgattactctgagcgccatcaccagcgactatgtcgtatgggtaaagcgccttacggacttcggtccgtaaggagcatcagagaaggggctccgcaccacgcc

SEQ ID NO: 744 - DNA, 119 bp, synthetic construct
  misc_feature 1..119: note = gRNA
  source 1..119: mol_type = other DNA
actggcgcttctatctgattactctgagcgccatcaccagcgactatgtcgtagtgggtaaagccgcttacggacttcggtccgtaagaggcatcagagaaggggctccgcaccacgcc

SEQ ID NO: 745 - DNA, 118 bp, synthetic construct
  misc_feature 1..118: note = gRNA
  source 1..118: mol_type = other DNA
acgggactttctatctgattactctgaagtccctcaccagcgactatgtcgtatgggtaaagccgcttacggacttcggtccgtaagaggcatcagagaaggggctccgcaccacgcc

SEQ ID NO: 746 - DNA, 118 bp, synthetic construct
  misc_feature 1..118: note = gRNA
  source 1..118: mol_type = other DNA
acctgtagttctatctgattactctgactacagtcaccagcgactatgtcgtatgggtaaagccgcttacggacttcggtccgtaagaggcatcagagaaggggctccgcaccacgcc

SEQ ID NO: 747 - DNA, 109 bp, synthetic construct
  misc_feature 1..109: note = gRNA
  source 1..109: mol_type = other DNA
actggcgcttttatctgattactttgagagccatcaccagcgactatgtcgtagtgggtaaagctccctcttcggagggagcatcaaagaagtggctccgcaccacgcc

SEQ ID NO: 748 - DNA, 119 bp, synthetic construct
  misc_feature 1..119: note = gRNA
  source 1..119: mol_type = other DNA
actggcgcttctatctgattactctgagcgccatcaccagcgactatgtcgtagtgggtaaagccgcttacggacttcggtccgtaagaggcatcagagaagtggctccgcaccacgcc

SEQ ID NO: 749 - DNA, 109 bp, synthetic construct
  misc_feature 1..109: note = gRNA
  source 1..109: mol_type = other DNA
actggcgcttttatctgattactttgagagccatcaccagcgactatgtcgtagtgggtaaagctccctcttcggagggagcatcaaagaaggggctgcgtaccacacc

SEQ ID NO: 750 - DNA, 119 bp, synthetic construct
  misc_feature 1..119: note = gRNA
  source 1..119: mol_type = other DNA
actggcgcttctatctgattactctgagcgccatcaccagcgactatgtcgtagtgggtaaagccgcttacggacttcggtccgtaagaggcatcagagaaggggctgcgtaccacacc

SEQ ID NO: 751 - DNA, 117 bp, synthetic construct
  misc_feature 1..117: note = gRNA
  source 1..117: mol_type = other DNA
actggcgcttctatctgattactctgagcgccatcaccagcgactatgtcgtagtgggtaaagccgcttacggacttcggtccgtaagaggcatcagaggggtcttcgagaagaccc

SEQ ID NO: 752 - DNA, 29 bp, synthetic construct
  misc_feature 1..29: note = CMV Fwd primer
  source 1..29: mol_type = other DNA
catctacgtattagtcatcgctattacca

SEQ ID NO: 753 - DNA, 21 bp, synthetic construct
  misc_feature 1..21: note = CMV Rev primer
  source 1..21: mol_type = other DNA
gaaatccccgtgagtcaaacc

SEQ ID NO: 754 - DNA, 17 bp, synthetic construct
  misc_feature 1..17: note = CMV probe
  source 1..17: mol_type = other DNA
tcaatgggcgtggatag

SEQ ID NO: 755 - DNA, 21 bp, synthetic construct
  misc_feature 1..21: note = AAV2 ITR Fwd primer
  source 1..21: mol_type = other DNA
ggaacccctagtgatggagtt

SEQ ID NO: 756 - DNA, 16 bp, synthetic construct
  misc_feature 1..16: note = AAV2 ITR Rev primer
  source 1..16: mol_type = other DNA
cggcctcagtgagcga

SEQ ID NO: 757 - DNA, 21 bp, synthetic construct
  misc_feature 1..21: note = AAV2 ITR probe
  source 1..21: mol_type = other DNA
cactccctctctgcgcgctcg

SEQ ID NO: 758 - DNA, 62 bp, synthetic construct
  misc_feature 1..62: note = Rho Fwd primer
  misc_difference 34..40: note = n is any nucleotide
  source 1..62: mol_type = other DNA
acactctttccctacacgacgctcttccgatctnnnnnnngcagccttggtctctgtctacg

SEQ ID NO: 759 - DNA, 57 bp, synthetic construct
  misc_feature 1..57: note = Rho Rev primer
  source 1..57: mol_type = other DNA
gtgactggagttcagacgtgtgctcttccgatctgccccagtctctctgctcatacc

SEQ ID NO: 760 - protein, 1039 aa, synthetic construct
  REGION 1..1039: note = CasX construct WT Cas X sequence of SEQ ID NO: 2 fused to an N terminal NLS
MAPKKKRKVSQEIKRINKIRRRLVKDSNTKKAGKTGPMKTLLVRVMTPDLRERLENLRKKPENIPQPISNTSRANLNKLLTDYTEMKKAILHVYWEEFQKDPVGLMSRVAQPAPKNIDQRKLIPVKDGNERLTSSGFACSQCCQPLYVYKLEQVNDKGKPHTNYFGRCNVSEHERLILLSPHKPEANDELVTYSLGKFGQRALDFYSIHVTRESNHPVKPLEQIGGNSCASGPVGKALSDACMGAVASFLTKYQDIILEHQKVIKKNEKRLANLKDIASANGLAFPKITLPPQPHTKEGIEAYNNVVAQIVIWVNLNLWQKLKIGRDEAKPLQRLKGFPSFPLVERQANEVDWWDMVCNVKKLINEKKEDGKVFWQNLAGYKRQEALLPYLSSEEDRKKGKKFARYQFGDLLLHLEKKHGEDWGKVYDEAWERIDKKVEGLSKHIKLEEERRSEDAQSKAALTDWLRAKASFVIEGLKEADKDEFCRCELKLQKWYGDLRGKPFAIEAENSILDISGFSKQYNCAFIWQKDGVKKLNLYLIINYFKGGKLRFKKIKPEAFEANRFYTVINKKSGEIVPMEVNFNFDDPNLIILPLAFGKRQGREFIWNDLLSLETGSLKLANGRVIEKTLYNRRTRQDEPALFVALTFERREVLDSSNIKPMNLIGIDRGENIPAVIALTDPEGCPLSRFKDSLGNPTHILRIGESYKEKQRTIQAAKEVEQRRAGGYSRKYASKAKNLADDMVRNTARDLLYYAVTQDAMLIFENLSRGFGRQGKRTFMAERQYTRMEDWLTAKLAYEGLPSKTYLSKTLAQYTSKTCSNCGFTITSADYDRVLEKLKKTATGWMTTINGKELKVEGQITYYNRYKRQNVVKDLSVELDRLSEESVNNDISSWTKGRSGEALSLLKKRFSHRPVQEKFVCLNCGFETHADEQAALNIARSWLFLRSQEYKKYQTNKTTGNTDKRAFVETWQSFYRKKLKEVWKPAVAPKKKRKVSENLYFQGSAWSHPQFEKGGGSGGGSGGSAWSHPQFEKGRGSGC

SEQ ID NO: 761 - protein, 1040 aa, synthetic construct
  REGION 1..1040: note = CasX construct CasX 119
MAPKKKRKVSQEIKRINKIRRRLVKDSNTKKAGKTGPMKTLLVRVMTPDLRERLENLRKKPENIPQPISNTSRANLNKLLTDYTEMKKAILHVYWEEFQKDPVGLMSRVAQPAPKNIDQRKLIPVKDGNERLTSSGFACSQCCQPLYVYKLEQVNDKGKPHTNYFGRCNVSEHERLILLSPHKPEANDELVTYSLGKFGQRALDFYSIHVTRESNHPVKPLEQIGGNSCASGPVGKALSDACMGAVASFLTKYQDIILEHQKVIKKNEKRLANLKDIASANGLAFPKITLPPQPHTKEGIEAYNNVVAQIVIWVNLNLWQKLKIGRDEAKPLQRLKGFPSFPLVERQANEVDWWDMVCNVKKLINEKKEDGKVFWQNLAGYKRQEALRPYLSSEEDRKKGKKFARYQFGDLLLHLEKKHGEDWGKVYDEAWERIDKKVEGLSKHIKLEEERRSEDAQSKAALTDWLRAKASFVIEGLKEADKDEFCRCELKLQKWYGDLRGKPFAIEAENSILDISGFSKQYNCAFIWQKDGVKKLNLYLIINYFKGGKLRFKKIKPEAFEANRFYTVINKKSGEIVPMEVNFNFDDPNLIILPLAFGKRQGREFIWNDLLSLETGSLKLANGRVIEKTLYNRRTRQDEPALFVALTFERREVLDSSNIKPMNLIGIDRGENIPAVIALTDPEGCPLSRFKDSLGNPTHILRIGESYKEKQRTIQAKKEVEQRRAGGYSRKYASKAKNLADDMVRNTARDLLYYAVTQDAMLIFENLSRGFGRQGKRTFMAERQYTRMEDWLTAKLAYEGLSKTYLSKTLAQYTSKTCSNCGFTITSADYDRVLEKLKKTATGWMTTINGKELKVEGQITYYNRYKRQNVVKDLSVELDRLSEESVNNDISSWTKGRSGEALSLLKKRFSHRPVQEKFVCLNCGFETHADEQAALNIARSWLFLRSQEYKKYQTNKTTGNTDKRAFVETWQSFYRKKLKEVWKPAVPPAPKKKRKVSENLYFQGSAWSHPQFEKGGGSGGGSGGSAWSHPQFEKGRGSGC

SEQ ID NO: 762 - protein, 1040 aa, synthetic construct
  REGION 1..1040: note = CasX construct CasX 438
MAPKKKRKVSQEIKRINKIRRRLVKDSNTKKAGKTGPMKTLLVRVMTPDLRERLENLRKKPENIPQPISNTSRANLNKLLTDYTEMKKAILHVYWEEFQKDPVGLMSRVAQPAPKNIDQRKLIPVKDGNERLTSSGFACSQCCQPLYVYKLEQVNDKGKPHTNYFGRCNVSEHERLILLSPHKPEANDELVTYSLGKFGQRALDFYSIHVTRESNHPVKPLEQIGGNSCASGPVGKALSDACMGAVASFLTKYQDIILEHQKVIKKNEKRLANLKDIASANGLAFPKITLPPQPHTKEGIEAYNNVVAQIVIWVNLNLWQKLKIGRDEAKPLQRLKGFPSFPLVERQANEVDWWDMVCNVKKLINEKKEDGKVFWQNLAGYKRQEALRPYLSSEEDRKKGKKFARYQLGDLLKHLEKKHGEDWGKVYDEAWERIDKKVEGLSKHIKLEEERRSEDAQSKAALTDWLRAKASFVIEGLKEADKDEFCRCELKLQKWYGDLRGKPFAIEAENSILDISGFSKQYNCAFIWQKDGVKKLNLYLIINYFKGGKLRFKKIKPEAFEANRFYTVINKKSGEIVPMEVNFNFDDPNLIILPLAFGKRQGREFIWNDLLSLETGSLKLANGRVIEKTLYNRRTRQDEPALFVALTFERREVLDSSNIKPMNLIGVDRGENIPAVIALTDPEGCPLSRFKDSLGNPTHILRIGESYKEKQRTIQAKKEVEQRRAGGYSRKYASKAKNLADDMVRNTARDLLYYAVTQDAMLIFENLSRGFGRQGKRTFMAERQYTRMEDWLTAKLAYEGLSKTYLSKTLAQYTSKTCSNCGFTITSADYDRVLEKLKKTATGWMTTINGKELKVEGQITYYNRRKRQNVVKDLSVELDRLSEESVNNDISSWTKGRSGEALSLLKKRFSHRPVQEKFVCLNCGFETHADEQAALNIARSWLFLRSQEYKKYQTNKTTGNTDKRAFVETWQSFYRKKLKEVWKPAVPPAPKKKRKVSENLYFQGSAWSHPQFEKGGGSGGGSGGSAWSHPQFEKGRGSGC

SEQ ID NO: 763 - protein, 1040 aa, synthetic construct
  REGION 1..1040: note = CasX construct CasX 457
MAPKKKRKVSQEIKRINKIRRRLVKDSNTKKAGKTGPMKTLLVRVMTPDLRERLENLRKKPENIPQPISNTSRANLNKLLTDYTEMKKAILHVYWEEFQKDPVGLMSRVAQPAPKNIDQRKLIPVKDGNERLTSSGFACSQCCQPLYVYKLEQVNDKGKPHTNYFGRCNVSEHERLILLSPHKPEANDELVTYSLGKFGQRALDFYSIHVTRESNHPVKPLEQIGGNSCASGPVGKALSDACMGAVASFLTKYQDIILEHKKVIKKNEKRLANLKDIASANGLAFPKITLPPQPHTKEGIEAYNNVVAQIVIWVNLNLWQKLKIGRDEAKPLQRLKGFPSFPLVERQANEVDWWDMVCNVKKLINEKKEDGKVFWQNLAGYKRQEALRPYLSSPEDRKKGKKFARYQLGDLLLHLEKKHGEDWGKVYDEAWERIDKKVEGLSKHIKLEEERRSEDAQSKAALTDWLRAKASFVIEGLKEADKDEFCRCELKLQKWYGDLRGKPFAIEAENSILDISGFSKQYNCAFIWQKDGVKKLNLYLIINYFKGGKLRFKKIKPEAFEANRFYTVINKKSGEIVPMEVNFNFDDPNLIILPLAFGKRQGREFIWNDLLSLETGSLKLANGRVIEKPLYNRRTRQDEPALFVALTFERREVLDSSNIKPMNLIGVDRGENIPAVIALTDPEGCPLSRFKDSLGNPTHILRIGESYKEKQRTIQAKKEVEQRRAGGYSRKYASKAKNLADDMVRNTARDLLYYAVTQDAMLIFENLSRGFGRQGKRTFMAERQYTRMEDWLTAKLAYEGLSKTYLSKTLAQYTSKTCSNCGFTITSADYDRVLEKLKKTATGWMTTINGKELKVEGQITYYNRRKRQNVVKDLSVELDRLSEESVNNDISSWTKGRSGEALSLLKKRFSHRPVQEKFVCLNCGFETHADEQAALNIARSWLFLRSQEYKKYQTNKTTGNTDKRAFVETWQSFYRKKLKEVWKPAVPPAPKKKRKVSENLYFQGSAWSHPQFEKGGGSGGGSGGSAWSHPQFEKGRGSGC

SEQ ID NO: 764 - protein, 976 aa, synthetic construct; identical to SEQ ID NO: 315
  REGION 1..976: note = CasX construct CasX 119

SEQ ID NO: 765 - protein, 976 aa, synthetic construct
  REGION 1..976: note = CasX construct CasX 457
QEIKRINKIRRRLVKDSNTKKAGKTGPMKTLLVRVMTPDLRERLENLRKKPENIPQPISNTSRANLNKLLTDYTEMKKAILHVYWEEFQKDPVGLMSRVAQPAPKNIDQRKLIPVKDGNERLTSSGFACSQCCQPLYVYKLEQVNDKGKPHTNYFGRCNVSEHERLILLSPHKPEANDELVTYSLGKFGQRALDFYSIHVTRESNHPVKPLEQIGGNSCASGPVGKALSDACMGAVASFLTKYQDIILEHKKVIKKNEKRLANLKDIASANGLAFPKITLPPQPHTKEGIEAYNNVVAQIVIWVNLNLWQKLKIGRDEAKPLQRLKGFPSFPLVERQANEVDWWDMVCNVKKLINEKKEDGKVFWQNLAGYKRQEALRPYLSSPEDRKKGKKFARYQLGDLLLHLEKKHGEDWGKVYDEAWERIDKKVEGLSKHIKLEEERRSEDAQSKAALTDWLRAKASFVIEGLKEADKDEFCRCELKLQKWYGDLRGKPFAIEAENSILDISGFSKQYNCAFIWQKDGVKKLNLYLIINYFKGGKLRFKKIKPEAFEANRFYTVINKKSGEIVPMEVNFNFDDPNLIILPLAFGKRQGREFIWNDLLSLETGSLKLANGRVIEKPLYNRRTRQDEPALFVALTFERREVLDSSNIKPMNLIGVDRGENIPAVIALTDPEGCPLSRFKDSLGNPTHILRIGESYKEKQRTIQAKKEVEQRRAGGYSRKYASKAKNLADDMVRNTARDLLYYAVTQDAMLIFENLSRGFGRQGKRTFMAERQYTRMEDWLTAKLAYEGLSKTYLSKTLAQYTSKTCSNCGFTITSADYDRVLEKLKKTATGWMTTINGKELKVEGQITYYNRRKRQNVVKDLSVELDRLSEESVNNDISSWTKGRSGEALSLLKKRFSHRPVQEKFVCLNCGFETHADEQAALNIARSWLFLRSQEYKKYQTNKTTGNTDKRAFVETWQSFYRKKLKEVWKPAV

SEQ ID NO: 766 - protein, 976 aa, synthetic construct
  REGION 1..976: note = CasX construct CasX 438
QEIKRINKIRRRLVKDSNTKKAGKTGPMKTLLVRVMTPDLRERLENLRKKPENIPQPISNTSRANLNKLLTDYTEMKKAILHVYWEEFQKDPVGLMSRVAQPAPKNIDQRKLIPVKDGNERLTSSGFACSQCCQPLYVYKLEQVNDKGKPHTNYFGRCNVSEHERLILLSPHKPEANDELVTYSLGKFGQRALDFYSIHVTRESNHPVKPLEQIGGNSCASGPVGKALSDACMGAVASFLTKYQDIILEHQKVIKKNEKRLANLKDIASANGLAFPKITLPPQPHTKEGIEAYNNVVAQIVIWVNLNLWQKLKIGRDEAKPLQRLKGFPSFPLVERQANEVDWWDMVCNVKKLINEKKEDGKVFWQNLAGYKRQEALRPYLSSEEDRKKGKKFARYQLGDLLKHLEKKHGEDWGKVYDEAWERIDKKVEGLSKHIKLEEERRSEDAQSKAALTDWLRAKASFVIEGLKEADKDEFCRCELKLQKWYGDLRGKPFAIEAENSILDISGFSKQYNCAFIWQKDGVKKLNLYLIINYFKGGKLRFKKIKPEAFEANRFYTVINKKSGEIVPMEVNFNFDDPNLIILPLAFGKRQGREFIWNDLLSLETGSLKLANGRVIEKTLYNRRTRQDEPALFVALTFERREVLDSSNIKPMNLIGVDRGENIPAVIALTDPEGCPLSRFKDSLGNPTHILRIGESYKEKQRTIQAKKEVEQRRAGGYSRKYASKAKNLADDMVRNTARDLLYYAVTQDAMLIFENLSRGFGRQGKRTFMAERQYTRMEDWLTAKLAYEGLSKTYLSKTLAQYTSKTCSNCGFTITSADYDRVLEKLKKTATGWMTTINGKELKVEGQITYYNRRKRQNVVKDLSVELDRLSEESVNNDISSWTKGRSGEALSLLKKRFSHRPVQEKFVCLNCGFETHADEQAALNIARSWLFLRSQEYKKYQTNKTTGNTDKRAFVETWQSFYRKKLKEVWKPAV

SEQ ID NO: 767 - protein, 987 aa, synthetic construct
  REGION 1..987: note = CasX construct CasX 278
MAPKKKRKVSRQEIKRINKIRRRLVKDSNTKKAGKTGPMKTLLVRVMTPDLRERLENLRKKPENIPQPISNTSRANLNKLLTDYTEMKKAILHVYWEEFQKDPVGLMSRVAQPAPKNIDQRKLIPVKDGNERLTSSGFACSQCCQPLYVYKLEQVNDKGKPHTNYFGRCNVSEHERLILLSPHKPEANDELVTYSLGKFGQRALDFYSIHVTRESNHPVKPLEQIGGNSCASGPVGKALSDACMGAVASFLTKYQDIILEHQKVIKKNEKRLANLKDIASANGLAFPKITLPPQPHTKEGIEAYNNVVAQIVIWVNLNLWQKLKIGRDEAKPLQRLKGFPSFPLVERQANEVDWWDMVCNVKKLINEKKEDGKVFWQNLAGYKRQEALRPYLSSEEDRKKGKKFARYQFGDLLLHLEKKHGEDWGKVYDEAWERIDKKVEGLSKHIKLEEERRSEDAQSKAALTDWLRAKASFVIEGLKEADKDEFCRCELKLQKWYGDLRGKPFAIEAENSILDISGFSKQYNCAFIWQKDGVKKLNLYLIINYFKGGKLRFKKIKPEAFEANRFYTVINKKSGEIVPMEVNFNFDDPNLIILPLAFGKRQGREFIWNDLLSLETGSLKLANGRVIEKTLYNRRTRQDEPALFVALTFERREVLDSSNIKPMNLIGIDRGENIPAVIALTDPEGCPLSRFKDSLGNPTHILRIGESYKEKQRTIQAKKEVEQRRAGGYSRKYASKAKNLADDMVRNTARDLLYYAVTQDAMLIFENLSRGFGRQGKRTFMAERQYTRMEDWLTAKLAYEGLSKTYLSKTLAQYTSKTCSNCGFTITSADYDRVLEKLKKTATGWMTTINGKELKVEGQITYYNRYKRQNVVKDLSVELDRLSEESVNNDISSWTKGRSGEALSLLKKRFSHRPVQEKFVCLNCGFETHADEQAALNIARSWLFLRSQEYKKYQTNKTTGNTDKRAFVETWQSFYRKKLKEVWKPAV

SEQ ID NO: 768 - protein, 986 aa, synthetic construct
  REGION 1..986: note = CasX construct CasX 279
MQEIKRINKIRRRLVKDSNTKKAGKTGPMKTLLVRVMTPDLRERLENLRKKPENIPQPISNTSRANLNKLLTDYTEMKKAILHVYWEEFQKDPVGLMSRVAQPAPKNIDQRKLIPVKDGNERLTSSGFACSQCCQPLYVYKLEQVNDKGKPHTNYFGRCNVSEHERLILLSPHKPEANDELVTYSLGKFGQRALDFYSIHVTRESNHPVKPLEQIGGNSCASGPVGKALSDACMGAVASFLTKYQDIILEHQKVIKKNEKRLANLKDIASANGLAFPKITLPPQPHTKEGIEAYNNVVAQIVIWVNLNLWQKLKIGRDEAKPLQRLKGFPSFPLVERQANEVDWWDMVCNVKKLINEKKEDGKVFWQNLAGYKRQEALRPYLSSEEDRKKGKKFARYQFGDLLLHLEKKHGEDWGKVYDEAWERIDKKVEGLSKHIKLEEERRSEDAQSKAALTDWLRAKASFVIEGLKEADKDEFCRCELKLQKWYGDLRGKPFAIEAENSILDISGFSKQYNCAFIWQKDGVKKLNLYLIINYFKGGKLRFKKIKPEAFEANRFYTVINKKSGEIVPMEVNFNFDDPNLIILPLAFGKRQGREFIWNDLLSLETGSLKLANGRVIEKTLYNRRTRQDEPALFVALTFERREVLDSSNIKPMNLIGIDRGENIPAVIALTDPEGCPLSRFKDSLGNPTHILRIGESYKEKQRTIQAKKEVEQRRAGGYSRKYASKAKNLADDMVRNTARDLLYYAVTQDAMLIFENLSRGFGRQGKRTFMAERQYTRMEDWLTAKLAYEGLSKTYLSKTLAQYTSKTCSNCGFTITSADYDRVLEKLKKTATGWMTTINGKELKVEGQITYYNRYKRQNVVKDLSVELDRLSEESVNNDISSWTKGRSGEALSLLKKRFSHRPVQEKFVCLNCGFETHADEQAALNIARSWLFLRSQEYKKYQTNKTTGNTDKRAFVETWQSFYRKKLKEVWKPAVTSPKKKRKV

SEQ ID NO: 769 - protein, 996 aa, synthetic construct
  REGION 1..996: note = CasX construct CasX 280
MQEIKRINKIRRRLVKDSNTKKAGKTGPMKTLLVRVMTPDLRERLENLRKKPENIPQPISNTSRANLNKLLTDYTEMKKAILHVYWEEFQKDPVGLMSRVAQPAPKNIDQRKLIPVKDGNERLTSSGFACSQCCQPLYVYKLEQVNDKGKPHTNYFGRCNVSEHERLILLSPHKPEANDELVTYSLGKFGQRALDFYSIHVTRESNHPVKPLEQIGGNSCASGPVGKALSDACMGAVASFLTKYQDIILEHQKVIKKNEKRLANLKDIASANGLAFPKITLPPQPHTKEGIEAYNNVVAQIVIWVNLNLWQKLKIGRDEAKPLQRLKGFPSFPLVERQANEVDWWDMVCNVKKLINEKKEDGKVFWQNLAGYKRQEALRPYLSSEEDRKKGKKFARYQFGDLLLHLEKKHGEDWGKVYDEAWERIDKKVEGLSKHIKLEEERRSEDAQSKAALTDWLRAKASFVIEGLKEADKDEFCRCELKLQKWYGDLRGKPFAIEAENSILDISGFSKQYNCAFIWQKDGVKKLNLYLIINYFKGGKLRFKKIKPEAFEANRFYTVINKKSGEIVPMEVNFNFDDPNLIILPLAFGKRQGREFIWNDLLSLETGSLKLANGRVIEKTLYNRRTRQDEPALFVALTFERREVLDSSNIKPMNLIGIDRGENIPAVIALTDPEGCPLSRFKDSLGNPTHILRIGESYKEKQRTIQAKKEVEQRRAGGYSRKYASKAKNLADDMVRNTARDLLYYAVTQDAMLIFENLSRGFGRQGKRTFMAERQYTRMEDWLTAKLAYEGLSKTYLSKTLAQYTSKTCSNCGFTITSADYDRVLEKLKKTATGWMTTINGKELKVEGQITYYNRYKRQNVVKDLSVELDRLSEESVNNDISSWTKGRSGEALSLLKKRFSHRPVQEKFVCLNCGFETHADEQAALNIARSWLFLRSQEYKKYQTNKTTGNTDKRAFVETWQSFYRKKLKEVWKPAVTSPKKKRKVPPPPKKKRKV

SEQ ID NO: 770 - protein, 1006 aa, synthetic construct
  REGION 1..1006: note = CasX construct CasX 285
MQEIKRINKIRRRLVKDSNTKKAGKTGPMKTLLVRVMTPDLRERLENLRKKPENIPQPISNTSRANLNKLLTDYTEMKKAILHVYWEEFQKDPVGLMSRVAQPAPKNIDQRKLIPVKDGNERLTSSGFACSQCCQPLYVYKLEQVNDKGKPHTNYFGRCNVSEHERLILLSPHKPEANDELVTYSLGKFGQRALDFYSIHVTRESNHPVKPLEQIGGNSCASGPVGKALSDACMGAVASFLTKYQDIILEHQKVIKKNEKRLANLKDIASANGLAFPKITLPPQPHTKEGIEAYNNVVAQIVIWVNLNLWQKLKIGRDEAKPLQRLKGFPSFPLVERQANEVDWWDMVCNVKKLINEKKEDGKVFWQNLAGYKRQEALRPYLSSEEDRKKGKKFARYQFGDLLLHLEKKHGEDWGKVYDEAWERIDKKVEGLSKHIKLEEERRSEDAQSKAALTDWLRAKASFVIEGLKEADKDEFCRCELKLQKWYGDLRGKPFAIEAENSILDISGFSKQYNCAFIWQKDGVKKLNLYLIINYFKGGKLRFKKIKPEAFEANRFYTVINKKSGEIVPMEVNFNFDDPNLIILPLAFGKRQGREFIWNDLLSLETGSLKLANGRVIEKTLYNRRTRQDEPALFVALTFERREVLDSSNIKPMNLIGIDRGENIPAVIALTDPEGCPLSRFKDSLGNPTHILRIGESYKEKQRTIQAKKEVEQRRAGGYSRKYASKAKNLADDMVRNTARDLLYYAVTQDAMLIFENLSRGFGRQGKRTFMAERQYTRMEDWLTAKLAYEGLSKTYLSKTLAQYTSKTCSNCGFTITSADYDRVLEKLKKTATGWMTTINGKELKVEGQITYYNRYKRQNVVKDLSVELDRLSEESVNNDISSWTKGRSGEALSLLKKRFSHRPVQEKFVCLNCGFETHADEQAALNIARSWLFLRSQEYKKYQTNKTTGNTDKRAFVETWQSFYRKKLKEVWKPAVTSPKKKRKVPPPHKKKHPDASVNFSEFSK

SEQ ID NO: 771 - protein, 1007 aa, synthetic construct
  REGION 1..1007: note = CasX construct CasX 286
MQEIKRINKIRRRLVKDSNTKKAGKTGPMKTLLVRVMTPDLRERLENLRKKPENIPQPISNTSRANLNKLLTDYTEMKKAILHVYWEEFQKDPVGLMSRVAQPAPKNIDQRKLIPVKDGNERLTSSGFACSQCCQPLYVYKLEQVNDKGKPHTNYFGRCNVSEHERLILLSPHKPEANDELVTYSLGKFGQRALDFYSIHVTRESNHPVKPLEQIGGNSCASGPVGKALSDACMGAVASFLTKYQDIILEHQKVIKKNEKRLANLKDIASANGLAFPKITLPPQPHTKEGIEAYNNVVAQIVIWVNLNLWQKLKIGRDEAKPLQRLKGFPSFPLVERQANEVDWWDMVCNVKKLINEKKEDGKVFWQNLAGYKRQEALRPYLSSEEDRKKGKKFARYQFGDLLLHLEKKHGEDWGKVYDEAWERIDKKVEGLSKHIKLEEERRSEDAQSKAALTDWLRAKASFVIEGLKEADKDEFCRCELKLQKWYGDLRGKPFAIEAENSILDISGFSKQYNCAFIWQKDGVKKLNLYLIINYFKGGKLRFKKIKPEAFEANRFYTVINKKSGEIVPMEVNFNFDDPNLIILPLAFGKRQGREFIWNDLLSLETGSLKLANGRVIEKTLYNRRTRQDEPALFVALTFERREVLDSSNIKPMNLIGIDRGENIPAVIALTDPEGCPLSRFKDSLGNPTHILRIGESYKEKQRTIQAKKEVEQRRAGGYSRKYASKAKNLADDMVRNTARDLLYYAVTQDAMLIFENLSRGFGRQGKRTFMAERQYTRMEDWLTAKLAYEGLSKTYLSKTLAQYTSKTCSNCGFTITSADYDRVLEKLKKTATGWMTTINGKELKVEGQITYYNRYKRQNVVKDLSVELDRLSEESVNNDISSWTKGRSGEALSLLKKRFSHRPVQEKFVCLNCGFETHADEQAALNIARSWLFLRSQEYKKYQTNKTTGNTDKRAFVETWQSFYRKKLKEVWKPAVTSPKKKRKVPPPQRPGPYDRPQRPGPYDRP

SEQ ID NO: 772 - protein, 1005 aa, synthetic construct
  REGION 1..1005: note = CasX construct CasX 287
MQEIKRINKIRRRLVKDSNTKKAGKTGPMKTLLVRVMTPDLRERLENLRKKPENIPQPISNTSRANLNKLLTDYTEMKKAILHVYWEEFQKDPVGLMSRVAQPAPKNIDQRKLIPVKDGNERLTSSGFACSQCCQPLYVYKLEQVNDKGKPHTNYFGRCNVSEHERLILLSPHKPEANDELVTYSLGKFGQRALDFYSIHVTRESNHPVKPLEQIGGNSCASGPVGKALSDACMGAVASFLTKYQDIILEHQKVIKKNEKRLANLKDIASANGLAFPKITLPPQPHTKEGIEAYNNVVAQIVIWVNLNLWQKLKIGRDEAKPLQRLKGFPSFPLVERQANEVDWWDMVCNVKKLINEKKEDGKVFWQNLAGYKRQEALRPYLSSEEDRKKGKKFARYQFGDLLLHLEKKHGEDWGKVYDEAWERIDKKVEGLSKHIKLEEERRSEDAQSKAALTDWLRAKASFVIEGLKEADKDEFCRCELKLQKWYGDLRGKPFAIEAENSILDISGFSKQYNCAFIWQKDGVKKLNLYLIINYFKGGKLRFKKIKPEAFEANRFYTVINKKSGEIVPMEVNFNFDDPNLIILPLAFGKRQGREFIWNDLLSLETGSLKLANGRVIEKTLYNRRTRQDEPALFVALTFERREVLDSSNIKPMNLIGIDRGENIPAVIALTDPEGCPLSRFKDSLGNPTHILRIGESYKEKQRTIQAKKEVEQRRAGGYSRKYASKAKNLADDMVRNTARDLLYYAVTQDAMLIFENLSRGFGRQGKRTFMAERQYTRMEDWLTAKLAYEGLSKTYLSKTLAQYTSKTCSNCGFTITSADYDRVLEKLKKTATGWMTTINGKELKVEGQITYYNRYKRQNVVKDLSVELDRLSEESVNNDISSWTKGRSGEALSLLKKRFSHRPVQEKFVCLNCGFETHADEQAALNIARSWLFLRSQEYKKYQTNKTTGNTDKRAFVETWQSFYRKKLKEVWKPAVTSPKKKRKVPPPLSPSLSPLLSPSLSPL

SEQ ID NO: 773 - protein, 1008 aa, synthetic construct
  REGION 1..1008: note = CasX construct CasX 288
MQEIKRINKIRRRLVKDSNTKKAGKTGPMKTLLVRVMTPDLRERLENLRKKPENIPQPISNTSRANLNKLLTDYTEMKKAILHVYWEEFQKDPVGLMSRVAQPAPKNIDQRKLIPVKDGNERLTMSSGFACSQCCQPLYVYKLEQVNDKGKPHTNYFGRCNVSEHERLILLSPHKPEANDELVTYSLGKFGQRALDFYSIHVTRESNHPVKPLEQIGGNSCASGPVGKALSDACMGAVASFLTKYQDIILEHQKVIKKNEKRLANLKDIASANGLAFPKITLPPQPHTKEGIEAYNNVVAQIVIWVNLNLWQKLKIGRDEAKPLQRLKGFPSFPLVERQANEVDWWDMVCNVKKLINEKKEDGKVFWQNLAGYKRQEALRPYLSSEEDRKKGKKFARYQFGDLLLHLEKKHGEDWGKVYDEAWERIDKKVEGLSKHIKLEEERRSEDAQSKAALTDWLRAKASFVIEGLKEADKDEFCRCELKLQKWYGDLRGKPFAIEAENSILDISGFSKQYNCAFIWQKDGVKKLNLYLIINYFKGGKLRFKKIKPEAFEANRFYTVINKKSGEIVPMEVNFNFDDPNLIILPLAFGKRQGREFIWNDLLSLETGSLKLANGRVIEKTLYNRRTRQDEPALFVALTFERREVLDSSNIKPMNLIGIDRGENIPAVIALTDPEGCPLSRFKDSLGNPTHILRIGESYKEKQRTIQAKKEVEQRRAGGYSRKYASKAKNLADDMVRNTARDLLYYAVTQDAMLIFENLSRGFGRQGKRTFMAERQYTRMEDWLTAKLAYEGLSKTYLSKTLAQYTSKTCSNCGFTITSADYDRVLEKLKKTATGWMTTINGKELKVEGQITYYNRYKRQNVVKDLSVELDRLSEESVNNDISSWTKGRSGEALSLLKKRFSHRPVQEKFVCLNCGFETHADEQAALNIARSWLFLRSQEYKKYQTNKTTGNTDKRAFVETWQSFYRKKLKEVWKPAVTSPKKKRKVPPPRGKGGKGLGKGGAKRHRK

SEQ ID NO: 774 - protein, 1013 aa, synthetic construct
  REGION 1..1013: note = CasX construct CasX 290
MQEIKRINKIRRRLVKDSNTKKAGKTGPMKTLLVRVMTPDLRERLENLRKKPENIPQPISNTSRANLNKLLTDYTEMKKAILHVYWEEFQKDPVGLMSRVAQPAPKNIDQRKLIPVKDGNERLTSSGFACSQCCQPLYVYKLEQVNDKGKPHTNYFGRCNVSEHERLILLSPHKPEANDELVTYSLGKFGQRALDFYSIHVTRESNHPVKPLEQIGGNSCASGPVGKALSDACMGAVASFLTKYQDIILEHQKVIKKNEKRLANLKDIASANGLAFPKITLPPQPHTKEGIEAYNNVVAQIVIWVNLNLWQKLKIGRDEAKPLQRLKGFPSFPLVERQANEVDWWDMVCNVKKLINEKKEDGKVFWQNLAGYKRQEALRPYLSSEEDRKKGKKFARYQFGDLLLHLEKKHGEDWGKVYDEAWERIDKKVEGLSKHIKLEEERRSEDAQSKAALTDWLRAKASFVIEGLKEADKDEFCRCELKLQKWYGDLRGKPFAIEAENSILDISGFSKQYNCAFIWQKDGVKKLNLYLIINYFKGGKLRFKKIKPEAFEANRFYTVINKKSGEIVPMEVNFNFDDPNLIILPLAFGKRQGREFIWNDLLSLETGSLKLANGRVIEKTLYNRRTRQDEPALFVALTFERREVLDSSNIKPMNLIGIDRGENIPAVIALTDPEGCPLSRFKDSLGNPTHILRIGESYKEKQRTIQAKKEVEQRRAGGYSRKYASKAKNLADDMVRNTARDLLYYAVTQDAMLIFENLSRGFGRQGKRTFMAERQYTRMEDWLTAKLAYEGLSKTYLSKTLAQYTSKTCSNCGFTITSADYDRVLEKLKKTATGWMTTINGKELKVEGQITYYNRYKRQNVVKDLSVELDRLSEESVNNDISSWTKGRSGEALSLLKKRFSHRPVQEKFVCLNCGFETHADEQAALNIARSWLFLRSQEYKKYQTNKTTGNTDKRAFVETWQSFYRKKLKEVWKPAVTSPKKKRKVPPPSRRRKANPTKLSENAKKLAKEVEN

SEQ ID NO: 775 - protein, 998 aa, synthetic construct
  REGION 1..998: note = CasX construct CasX 291
MQEIKRINKIRRRLVKDSNTKKAGKTGPMKTLLVRVMTPDLRERLENLRKKPENIPQPISNTSRANLNKLLTDYTEMKKAILHVYWEEFQKDPVGLMSRVAQPAPKNIDQRKLIPVKDGNERLTSSGFACSQCCQPLYVYKLEQVNDKGKPHTNYFGRCNVSEHERLILLSPHKPEANDELVTYSLGKFGQRALDFYSIHVTRESNHPVKPLEQIGGNSCASGPVGKALSDACMGAVASFLTKYQDIILEHQKVIKKNEKRLANLKDIASANGLAFPKITLPPQPHTKEGIEAYNNVVAQIVIWVNLNLWQKLKIGRDEAKPLQRLKGFPSFPLVERQANEVDWWDMVCNVKKLINEKKEDGKVFWQNLAGYKRQEALRPYLSSEEDRKKGKKFARYQFGDLLLHLEKKHGEDWGKVYDEAWERIDKKVEGLSKHIKLEEERRSEDAQSKAALTDWLRAKASFVIEGLKEADKDEFCRCELKLQKWYGDLRGKPFAIEAENSILDISGFSKQYNCAFIWQKDGVKKLNLYLIINYFKGGKLRFKKIKPEAFEANRFYTVINKKSGEIVPMEVNFNFDDPNLIILPLAFGKRQGREFIWNDLLSLETGSLKLANGRVIEKTLYNRRTRQDEPALFVALTFERREVLDSSNIKPMNLIGIDRGENIPAVIALTDPEGCPLSRFKDSLGNPTHILRIGESYKEKQRTIQAKKEVEQRRAGGYSRKYASKAKNLADDMVRNTARDLLYYAVTQDAMLIFENLSRGFGRQGKRTFMAERQYTRMEDWLTAKLAYEGLSKTYLSKTLAQYTSKTCSNCGFTITSADYDRVLEKLKKTATGWMTTINGKELKVEGQITYYNRYKRQNVVKDLSVELDRLSEESVNNDISSWTKGRSGEALSLLKKRFSHRPVQEKFVCLNCGFETHADEQAALNIARSWLFLRSQEYKKYQTNKTTGNTDKRAFVETWQSFYRKKLKEVWKPAVTSPKKKRKVPPPPAAKRVKLD

SEQ ID NO: 776 - protein, 997 aa, synthetic construct
  REGION 1..997: note = CasX construct CasX 293
MQEIKRINKIRRRLVKDSNTKKAGKTGPMKTLLVRVMTPDLRERLENLRKKPENIPQPISNTSRANLNKLLTDYTEMKKAILHVYWEEFQKDPVGLMSRVAQPAPKNIDQRKLIPVKDGNERLTSSGFACSQCCQPLYVYKLEQVNDKGKPHTNYFGRCNVSEHERLILLSPHKPEANDELVTYSLGKFGQRALDFYSIHVTRESNHPVKPLEQIGGNSCASGPVGKALSDACMGAVASFLTKYQDIILEHQKVIKKNEKRLANLKDIASANGLAFPKITLPPQPHTKEGIEAYNNVVAQIVIWVNLNLWQKLKIGRDEAKPLQRLKGFPSFPLVERQANEVDWWDMVCNVKKLINEKKEDGKVFWQNLAGYKRQEALRPYLSSEEDRKKGKKFARYQFGDLLLHLEKKHGEDWGKVYDEAWERIDKKVEGLSKHIKLEEERRSEDAQSKAALTDWLRAKASFVIEGLKEADKDEFCRCELKLQKWYGDLRGKPFAIEAENSILDISGFSKQYNCAFIWQKDGVKKLNLYLIINYFKGGKLRFKKIKPEAFEANRFYTVINKKSGEIVPMEVNFNFDDPNLIILPLAFGKRQGREFIWNDLLSLETGSLKLANGRVIEKTLYNRRTRQDEPALFVALTFERREVLDSSNIKPMNLIGIDRGENIPAVIALTDPEGCPLSRFKDSLGNPTHILRIGESYKEKQRTIQAKKEVEQRRAGGYSRKYASKAKNLADDMVRNTARDLLYYAVTQDAMLIFENLSRGFGRQGKRTFMAERQYTRMEDWLTAKLAYEGLSKTYLSKTLAQYTSKTCSNCGFTITSADYDRVLEKLKKTATGWMTTINGKELKVEGQITYYNRYKRQNVVKDLSVELDRLSEESVNNDISSWTKGRSGEALSLLKKRFSHRPVQEKFVCLNCGFETHADEQAALNIARSWLFLRSQEYKKYQTNKTTGNTDKRAFVETWQSFYRKKLKEVWKPAVTSPKKKRKVPPPKRSFSKAF

SEQ ID NO: 777 - protein, 1008 aa, synthetic construct
  REGION 1..1008: note = CasX construct CasX 300
MQEIKRINKIRRRLVKDSNTKKAGKTGPMKTLLVRVMTPDLRERLENLRKKPENIPQPISNTSRANLNKLLTDYTEMKKAILHVYWEEFQKDPVGLMSRVAQPAPKNIDQRKLIPVKDGNERLTSSGFACSQCCQPLYVYKLEQVNDKGKPHTNYFGRCNVSEHERLILLSPHKPEANDELVTYSLGKFGQRALDFYSIHVTRESNHPVKPLEQIGGNSCASGPVGKALSDACMGAVASFLTKYQDIILEHQKVIKKNEKRLANLKDIASANGLAFPKITLPPQPHTKEGIEAYNNVVAQIVIWVNLNLWQKLKIGRDEAKPLQRLKGFPSFPLVERQANEVDWWDMVCNVKKLINEKKEDGKVFWQNLAGYKRQEALRPYLSSEEDRKKGKKFARYQFGDLLLHLEKKHGEDWGKVYDEAWERIDKKVEGLSKHIKLEEERRSEDAQSKAALTDWLRAKASFVIEGLKEADKDEFCRCELKLQKWYGDLRGKPFAIEAENSILDISGFSKQYNCAFIWQKDGVKKLNLYLIINYFKGGKLRFKKIKPEAFEANRFYTVINKKSGEIVPMEVNFNFDDPNLIILPLAFGKRQGREFIWNDLLSLETGSLKLANGRVIEKTLYNRRTRQDEPALFVALTFERREVLDSSNIKPMNLIGIDRGENIPAVIALTDPEGCPLSRFKDSLGNPTHILRIGESYKEKQRTIQAKKEVEQRRAGGYSRKYASKAKNLADDMVRNTARDLLYYAVTQDAMLIFENLSRGFGRQGKRTFMAERQYTRMEDWLTAKLAYEGLSKTYLSKTLAQYTSKTCSNCGFTITSADYDRVLEKLKKTATGWMTTINGKELKVEGQITYYNRYKRQNVVKDLSVELDRLSEESVNNDISSWTKGRSGEALSLLKKRFSHRPVQEKFVCLNCGFETHADEQAALNIARSWLFLRSQEYKKYQTNKTTGNTDKRAFVETWQSFYRKKLKEVWKPAVTSPKKKRKVPPPKRGINDRNFWRGENERKTR

SEQ ID NO: 778 - protein, 1007 aa, synthetic construct
  REGION 1..1007: note = CasX construct CasX 492
MAPKKKRKVSRMQEIKRINKIRRRLVKDSNTKKAGKTGPMKTLLVRVMTPDLRERLENLRKKPENIPQPISNTSRANLNKLLTDYTEMKKAILHVYWEEFQKDPVGLMSRVAQPAPKNIDQRKLIPVKDGNERLTSSGFACSQCCQPLYVYKLEQVNDKGKPHTNYFGRCNVSEHERLILLSPHKPEANDELVTYSLGKFGQRALDFYSIHVTRESNHPVKPLEQIGGNSCASGPVGKALSDACMGAVASFLTKYQDIILEHQKVIKKNEKRLANLKDIASANGLAFPKITLPPQPHTKEGIEAYNNVVAQIVIWVNLNLWQKLKIGRDEAKPLQRLKGFPSFPLVERQANEVDWWDMVCNVKKLINEKKEDGKVFWQNLAGYKRQEALRPYLSSEEDRKKGKKFARYQFGDLLLHLEKKHGEDWGKVYDEAWERIDKKVEGLSKHIKLEEERRSEDAQSKAALTDWLRAKASFVIEGLKEADKDEFCRCELKLQKWYGDLRGKPFAIEAENSILDISGFSKQYNCAFIWQKDGVKKLNLYLIINYFKGGKLRFKKIKPEAFEANRFYTVINKKSGEIVPMEVNFNFDDPNLIILPLAFGKRQGREFIWNDLLSLETGSLKLANGRVIEKTLYNRRTRQDEPALFVALTFERREVLDSSNIKPMNLIGIDRGENIPAVIALTDPEGCPLSRFKDSLGNPTHILRIGESYKEKQRTIQAKKEVEQRRAGGYSRKYASKAKNLADDMVRNTARDLLYYAVTQDAMLIFENLSRGFGRQGKRTFMAERQYTRMEDWLTAKLAYEGLSKTYLSKTLAQYTSKTCSNCGFTITSADYDRVLEKLKKTATGWMTTINGKELKVEGQITYYNRYKRQNVVKDLSVELDRLSEESVNNDISSWTKGRSGEALSLLKKRFSHRPVQEKFVCLNCGFETHADEQAALNIARSWLFLRSQEYKKYQTNKTTGNTDKRAFVETWQSFYRKKLKEVWKPAVTSPKKKRKVPPPPKKKRKV

SEQ ID NO: 779 - protein, 1009 aa, synthetic construct
  REGION 1..1009: note = CasX construct CasX 493
MAPKKKRKVSRMQEIKRINKIRRRLVKDSNTKKAGKTGPMKTLLVRVMTPDLRERLENLRKKPENIPQPISNTSRANLNKLLTDYTEMKKAILHVYWEEFQKDPVGLMSRVAQPAPKNIDQRKLIPVKDGNERLTSSGFACSQCCQPLYVYKLEQVNDKGKPHTNYFGRCNVSEHERLILLSPHKPEANDELVTYSLGKFGQRALDFYSIHVTRESNHPVKPLEQIGGNSCASGPVGKALSDACMGAVASFLTKYQDIILEHQKVIKKNEKRLANLKDIASANGLAFPKITLPPQPHTKEGIEAYNNVVAQIVIWVNLNLWQKLKIGRDEAKPLQRLKGFPSFPLVERQANEVDWWDMVCNVKKLINEKKEDGKVFWQNLAGYKRQEALRPYLSSEEDRKKGKKFARYQFGDLLLHLEKKHGEDWGKVYDEAWERIDKKVEGLSKHIKLEEERRSEDAQSKAALTDWLRAKASFVIEGLKEADKDEFCRCELKLQKWYGDLRGKPFAIEAENSILDISGFSKQYNCAFIWQKDGVKKLNLYLIINYFKGGKLRFKKIKPEAFEANRFYTVINKKSGEIVPMEVNFNFDDPNLIILPLAFGKRQGREFIWNDLLSLETGSLKLANGRVIEKTLYNRRTRQDEPALFVALTFERREVLDSSNIKPMNLIGIDRGENIPAVIALTDPEGCPLSRFKDSLGNPTHILRIGESYKEKQRTIQAKKEVEQRRAGGYSRKYASKAKNLADDMVRNTARDLLYYAVTQDAMLIFENLSRGFGRQGKRTFMAERQYTRMEDWLTAKLAYEGLSKTYLSKTLAQYTSKTCSNCGFTITSADYDRVLEKLKKTATGWMTTINGKELKVEGQITYYNRYKRQNVVKDLSVELDRLSEESVNNDISSWTKGRSGEALSLLKKRFSHRPVQEKFVCLNCGFETHADEQAALNIARSWLFLRSQEYKKYQTNKTTGNTDKRAFVETWQSFYRKKLKEVWKPAVTSPKKKRKVPPPPAAKRVKLD

SEQ ID NO: 780 - protein, 997 aa, synthetic construct
  REGION 1..997: note = CasX 387 construct
MAPKKKRKVSRQEIKRINKIRRRLVKDSNTKKAGKTGPMKTLLVRVMTPDLRERLENLRKKPENIPQPISNTSRANLNKLLTDYTEMKKAILHVYWEEFQKDPVGLMSRVAQPASKKIDQNKLKPEMDEKGNLTTAGFACSQCGQPLFVYKLEQVSEKGKAYTNYFGRCNVAEHEKLILLAQLKPEKDSDEAVTYSLGKFGQRALDFYSIHVTRESNHPVKPLEQIGGNSCASGPVGKALSDACMGAVASFLTKYQDIILEHQKVIKKNEKRLANLKDIASANGLAFPKITLPPQPHTKEGIEAYNNVVAQIVIWVNLNLWQKLKIGRDEAKPLQRLKGFPSFPLVERQANEVDWWDMVCNVKKLINEKKEDGKVFWQNLAGYKRQEALRPYLSSEEDRKKGKKFARYQFGDLLLHLEKKHGEDWGKVYDEAWERIDKKVEGLSKHIKLEEERRSEDAQSKAALTDWLRAKASFVIEGLKEADKDEFCRCELKLQKWYGDLRGKPFAIEAENSILDISGFSKQYNCAFIWQKDGVKKLNLYLIINYFKGGKLRFKKIKPEAFEANRFYTVINKKSGEIVPMEVNFNFDDPNLIILPLAFGKRQGREFIWNDLLSLETGSLKLANGRVIEKTLYNRRTRQDEPALFVALTFERREVLDSSNIKPMNLIGIDRGENIPAVIALTDPEGCPLSRFKDSLGNPTHILRIGESYKEKQRTIQAKKEVEQRRAGGYSRKYASKAKNLADDMVRNTARDLLYYAVTQDAMLIFENLSRGFGRQGKRTFMAERQYTRMEDWLTAKLAYEGLSKTYLSKTLAQYTSKTCSNCGFTITSADYDRVLEKLKKTATGWMTTINGKELKVEGQITYYNRYKRQNVVKDLSVELDRLSEESVNNDISSWTKGRSGEALSLLKKRFSHRPVQEKFVCLNCGFETHADEQAALNIARSWLFLRSQEYKKYQTNKTTGNTDKRAFVETWQSFYRKKLKEVWKPAVTSPKKKRKV

SEQ ID NO: 781 - protein, 1005 aa, synthetic construct
  REGION 1..1005: note = CasX 395 construct
MAPKKKRKVSRQEIKRINKIRRRLVKDSNTKKAGKTGPMKTLLVRVMTPDLRERLENLRKKPENIPQPISNTSRANLNKLLTDYTEMKKAILHVYWEEFQKDPVGLMSRVAQPAPKNIDQRKLIPVKDGNERLTSSGFACSQCCQPLYVYKLEQVNDKGKPHTNYFGRCNVSEHERLILLSPHKPEANDELVTYSLGKFGQRALDFYSIHVTKESTHPVKPLAQIAGNRYASGPVGKALSDACMGTIASFLSKYQDIIIEHQKVVKGNQKRLESLRELAGKENLEYPSVTLPPQPHTKEGVDAYNEVIARVRMWVNLNLWQKLKLSRDDAKPLLRLKGFPSFPLVERQANEVDWWDMVCNVKKLINEKKEDGKVFWQNLAGYKRQEALRPYLSSEEDRKKGKKFARYQFGDLLLHLEKKHGEDWGKVYDEAWERIDKKVEGLSKHIKLEEERRSEDAQSKAALTDWLRAKASFVIEGLKEADKDEFCRCELKLQKWYGDLRGKPFAIEAENSILDISGFSKQYNCAFIWQKDGVKKLNLYLIINYFKGGKLRFKKIKPEAFEANRFYTVINKKSGEIVPMEVNFNFDDPNLIILPLAFGKRQGREFIWNDLLSLETGSLKLANGRVIEKTLYNRRTRQDEPALFVALTFERREVLDSSNIKPMNLIGIDRGENIPAVIALTDPEGCPLSRFKDSLGNPTHILRIGESYKEKQRTIQAKKEVEQRRAGGYSRKYASKAKNLADDMVRNTARDLLYYAVTQDAMLIFENLSRGFGRQGKRTFMAERQYTRMEDWLTAKLAYEGLSKTYLSKTLAQYTSKTCSNCGFTITSADYDRVLEKLKKTATGWMTTINGKELKVEGQITYYNRYKRQNVVKDLSVELDRLSEESVNNDISSWTKGRSGEALSLLKKRFSHRPVQEKFVCLNCGFETHADEQAALNIARSWLFLRSQEYKKYQTNKTTGNTDKRAFVETWQSFYRKKLKEVWKPAVTSPKKKRKVTSPKKKRKV

SEQ ID NO: 782 - protein, 996 aa, synthetic construct
  REGION 1..996: note = CasX 485 construct
MAPKKKRKVSRQEIKRINKIRRRLVKDSNTKKAGKTGPMKTLLVRVMTPDLRERLENLRKKPENIPQPISNTSRANLNKLLTDYTEMKKAILHVYWEEFQKDPVGLMSRVAQPAPKNIDQRKLIPVKDGNERLTSSGFACSQCCQPLYVYKLEQVNDKGKPHTNYFGRCNVSEHERLILLSPHKPEANDELVTYSLGKFGQRALDFYSIHVTKESTHPVKPLAQIAGNRYASGPVGKALSDACMGTIASFLSKYQDIIIEHQKVVKGNQKRLESLRELAGKENLEYPSVTLPPQPHTKEGVDAYNEVIARVRMWVNLNLWQKLKLSRDDAKPLLRLKGFPSFPLVERQANEVDWWDMVCNVKKLINEKKEDGKVFWQNLAGYKRQEALRPYLSSEEDRKKGKKFARYQLGDLLLHLEKKHGEDWGKVYDEAWERIDKKVEGLSKHIKLEEERRSEDAQSKAALTDWLRAKASFVIEGLKEADKDEFCRCELKLQKWYGDLRGKPFAIEAENSILDISGFSKQYNCAFIWQKDGVKKLNLYLIINYFKGGKLRFKKIKPEAFEANRFYTVINKKSGEIVPMEVNFNFDDPNLIILPLAFGKRQGREFIWNDLLSLETGSLKLANGRVIEKTLYNRRTRQDEPALFVALTFERREVLDSSNIKPMNLIGVDRGENIPAVIALTDPEGCPLSRFKDSLGNPTHILRIGESYKEKQRTIQAKKEVEQRRAGGYSRKYASKAKNLADDMVRNTARDLLYYAVTQDAMLIFENLSRGFGRQGKRTFMAERQYTRMEDWLTAKLAYEGLSKTYLSKTLAQYTSKTCSNCGFTITSADYDRVLEKLKKTATGWMTTINGKELKVEGQITYYNRRKRQNVVKDLSVELDRLSEESVNNDISSWTKGRSGEALSLLKKRFSHRPVQEKFVCLNCGFETHADEQAALNIARSWLFLRSQEYKKYQTNKTTGNTDKRAFVETWQSFYRKKLKEVWKPAVTSPKKKRKV

SEQ ID NO: 783 - protein, 996 aa, synthetic construct
  REGION 1..996: note = CasX 486 construct
MAPKKKRKVSRQEIKRINKIRRRLVKDSNTKKAGKTGPMKTLLVRVMTPDLRERLENLRKKPENIPQPISNTSRANLNKLLTDYTEMKKAILHVYWEEFQKDPVGLMSRVAQPAPKNIDQRKLIPVKDGNERLTSSGFACSQCCQPLYVYKLEQVNDKGKPHTNYFGRCNVSEHERLILLSPHKPEANDELVTYSLGKFGQRALDFYSIHVTKESTHPVKPLAQIAGNRYASGPVGKALSDACMGTIASFLSKYQDIIIEHQKVVKGNQKRLESLRELAGKENLEYPSVTLPPQPHTKEGVDAYNEVIARVRMWVNLNLWQKLKLSRDDAKPLLRLKGFPSFPLVERQANEVDWWDMVCNVKKLINEKKEDGKVFWQNLAGYKRQEALRPYLSSEEDRKKGKKFARYQLGDLLKHLEKKHGEDWGKVYDEAWERIDKKVEGLSKHIKLEEERRSEDAQSKAALTDWLRAKASFVIEGLKEADKDEFCRCELKLQKWYGDLRGKPFAIEAENSILDISGFSKQYNCAFIWQKDGVKKLNLYLIINYFKGGKLRFKKIKPEAFEANRFYTVINKKSGEIVPMEVNFNFDDPNLIILPLAFGKRQGREFIWNDLLSLETGSLKLANGRVIEKTLYNRRTRQDEPALFVALTFERREVLDSSNIKPMNLIGVDRGENIPAVIALTDPEGCPLSRFKDSLGNPTHILRIGESYKEKQRTIQAKKEVEQRRAGGYSRKYASKAKNLADDMVRNTARDLLYYAVTQDAMLIFENLSRGFGRQGKRTFMAERQYTRMEDWLTAKLAYEGLSKTYLSKTLAQYTSKTCSNCGFTITSADYDRVLEKLKKTATGWMTTINGKELKVEGQITYYNRRKRQNVVKDLSVELDRLSEESVNNDISSWTKGRSGEALSLLKKRFSHRPVQEKFVCLNCGFETHADEQAALNIARSWLFLRSQEYKKYQTNKTTGNTDKRAFVETWQSFYRKKLKEVWKPAVTSPKKKRKV

SEQ ID NO: 784 - protein, 996 aa, synthetic construct
  REGION 1..996: note = CasX 487 construct
MAPKKKRKVSRQEIKRINKIRRRLVKDSNTKKAGKTGPMKTLLVRVMTPDLRERLENLRKKPENIPQPISNTSRANLNKLLTDYTEMKKAILHVYWEEFQKDPVGLMSRVAQPAPKNIDQRKLIPVKDGNERLTSSGFACSQCCQPLYVYKLEQVNDKGKPHTNYFGRCNVSEHERLILLSPHKPEANDELVTYSLGKFGQRALDFYSIHVTKESTHPVKPLAQIAGNRYASGPVGKALSDACMGTIASFLSKYQDIIIEHQKVVKGNQKRLESLRELAGKENLEYPSVTLPPQPHTKEGVDAYNEVIARVRMWVNLNLWQKLKLSRDDAKPLLRLKGFPSFPLVERQANEVDWWDMVCNVKKLINEKKEDGKVFWQNLAGYKRQEALRPYLSSEEDRKKGKKFARYQLGDLLLHLEKKHGEDWGKVYDEAWERIDKKVEGLSKHIKLEEERRSEDAQSKAALTDWLRAKASFVIEGLKEADKDEFCRCELKLQKWYGDLRGKPFAIEAENSILDISGFSKQYNCAFIWQKDGVKKLNLYLIINYFKGGKLRFKKIKPEAFEANRFYTVINKKSGEIVPMEVNFNFDDPNLIILPLAFGKRQGREFIWNDLLSLETGSLKLANGRVIEKTLYNRRTRQDEPALFVALTFERREVLDSSNIKPMNLIGVDRGENIPAVIALTDPEGCPLSRFKDSLGNPTHILRIGESYKEKQRTIQAKKEVEQRRAGGYSRKYASKAKNLADDMVRNTARDLLYYAVTQDAMLIFENLSRGFGRQGKRTFMAERQYTRMEDWLTAKLAYEGLSKTYLSKTLAQYTSKTCSNCGFTITSADYDRVLEKLKKTATGWMTTINGKELKVEGQITYYNRYKRQNVVKDLSVELDRLSEESVNNDISSWTKGRSGEALSLLKKRFSHRPVQEKFVCLNCGFETHADEQAALNIARSWLFLRSQEYKKYQTNKTTGNTDKRAFVETWQSFYRKKLKEVWKPAVTSPKKKRKV

SEQ ID NO: 785 - protein, 997 aa, synthetic construct
  REGION 1..997: note = CasX 488 construct
MAPKKKRKVSRQEIKRINKIRRRLVKDSNTKKAGKTGPMKTLLVRVMTPDLRERLENLRKKPENIPQPISNTSRANLNKLLTDYTEMKKAILHVYWEEFQKDPVGLMSRVAQPASKKIDQNKLKPEMDEKGNLTTAGFACSQCGQPLFVYKLEQVSEKGKAYTNYFGRCNVAEHEKLILLAQLKPEKDSDEAVTYSLGKFGQRALDFYSIHVTKESTHPVKPLAQIAGNRYASGPVGKALSDACMGTIASFLSKYQDIIIEHQKVVKGNQKRLESLRELAGKENLEYPSVTLPPQPHTKEGVDAYNEVIARVRMWVNLNLWQKLKLSRDDAKPLLRLKGFPSFPLVERQANEVDWWDMVCNVKKLINEKKEDGKVFWQNLAGYKRQEALRPYLSSEEDRKKGKKFARYQFGDLLLHLEKKHGEDWGKVYDEAWERIDKKVEGLSKHIKLEEERRSEDAQSKAALTDWLRAKASFVIEGLKEADKDEFCRCELKLQKWYGDLRGKPFAIEAENSILDISGFSKQYNCAFIWQKDGVKKLNLYLIINYFKGGKLRFKKIKPEAFEANRFYTVINKKSGEIVPMEVNFNFDDPNLIILPLAFGKRQGREFIWNDLLSLETGSLKLANGRVIEKTLYNRRTRQDEPALFVALTFERREVLDSSNIKPMNLIGIDRGENIPAVIALTDPEGCPLSRFKDSLGNPTHILRIGESYKEKQRTIQAKKEVEQRRAGGYSRKYASKAKNLADDMVRNTARDLLYYAVTQDAMLIFENLSRGFGRQGKRTFMAERQYTRMEDWLTAKLAYEGLSKTYLSKTLAQYTSKTCSNCGFTITSADYDRVLEKLKKTATGWMTTINGKELKVEGQITYYNRYKRQNVVKDLSVELDRLSEESVNNDISSWTKGRSGEALSLLKKRFSHRPVQEKFVCLNCGFETHADEQAALNIARSWLFLRSQEYKKYQTNKTTGNTDKRAFVETWQSFYRKKLKEVWKPAVTSPKKKRKV

SEQ ID NO: 786 - protein, 997 aa, synthetic construct
  REGION 1..997: note = CasX 489 construct
MAPKKKRKVSRQEIKRINKIRRRLVKDSNTKKAGKTGPMKTLLVRVMTPDLRERLENLRKKPENIPQPISNTSRANLNKLLTDYTEMKKAILHVYWEEFQKDPVGLMSRVAQPASKKIDQNKLKPEMDEKGNLTTAGFACSQCGQPLFVYKLEQVSEKGKAYTNYFGRCNVAEHEKLILLAQLKPEKDSDEAVTYSLGKFGQRALDFYSIHVTKESTHPVKPLAQIAGNRYASGPVGKALSDACMGTIASFLSKYQDIIIEHQKVVKGNQKRLESLRELAGKENLEYPSVTLPPQPHTKEGVDAYNEVIARVRMWVNLNLWQKLKLSRDDAKPLLRLKGFPSFPLVERQANEVDWWDMVCNVKKLINEKKEDGKVFWQNLAGYKRQEALRPYLSSEEDRKKGKKFARYQLGDLLLHLEKKHGEDWGKVYDEAWERIDKKVEGLSKHIKLEEERRSEDAQSKAALTDWLRAKASFVIEGLKEADKDEFCRCELKLQKWYGDLRGKPFAIEAENSILDISGFSKQYNCAFIWQKDGVKKLNLYLIINYFKGGKLRFKKIKPEAFEANRFYTVINKKSGEIVPMEVNFNFDDPNLIILPLAFGKRQGREFIWNDLLSLETGSLKLANGRVIEKTLYNRRTRQDEPALFVALTFERREVLDSSNIKPMNLIGVDRGENIPAVIALTDPEGCPLSRFKDSLGNPTHILRIGESYKEKQRTIQAKKEVEQRRAGGYSRKYASKAKNLADDMVRNTARDLLYYAVTQDAMLIFENLSRGFGRQGKRTFMAERQYTRMEDWLTAKLAYEGLSKTYLSKTLAQYTSKTCSNCGFTITSADYDRVLEKLKKTATGWMTTINGKELKVEGQITYYNRRKRQNVVKDLSVELDRLSEESVNNDISSWTKGRSGEALSLLKKRFSHRPVQEKFVCLNCGFETHADEQAALNIARSWLFLRSQEYKKYQTNKTTGNTDKRAFVETWQSFYRKKLKEVWKPAVTSPKKKRKV

SEQ ID NO: 787 - protein, 997 aa, synthetic construct
  REGION 1..997: note = CasX 490 construct
MAPKKKRKVSRQEIKRINKIRRRLVKDSNTKKAGKTGPMKTLLVRVMTPDLRERLENLRKKPENIPQPISNTSRANLNKLLTDYTEMKKAILHVYWEEFQKDPVGLMSRVAQPASKKIDQNKLKPEMDEKGNLTTAGFACSQCGQPLFVYKLEQVSEKGKAYTNYFGRCNVAEHEKLILLAQLKPEKDSDEAVTYSLGKFGQRALDFYSIHVTKESTHPVKPLAQIAGNRYASGPVGKALSDACMGTIASFLSKYQDIIIEHQKVVKGNQKRLESLRELAGKENLEYPSVTLPPQPHTKEGVDAYNEVIARVRMWVNLNLWQKLKLSRDDAKPLLRLKGFPSFPLVERQANEVDWWDMVCNVKKLINEKKEDGKVFWQNLAGYKRQEALRPYLSSEEDRKKGKKFARYQLGDLLKHLEKKHGEDWGKVYDEAWERIDKKVEGLSKHIKLEEERRSEDAQSKAALTDWLRAKASFVIEGLKEADKDEFCRCELKLQKWYGDLRGKPFAIEAENSILDISGFSKQYNCAFIWQKDGVKKLNLYLIINYFKGGKLRFKKIKPEAFEANRFYTVINKKSGEIVPMEVNFNFDDPNLIILPLAFGKRQGREFIWNDLLSLETGSLKLANGRVIEKTLYNRRTRQDEPALFVALTFERREVLDSSNIKPMNLIGVDRGENIPAVIALTDPEGCPLSRFKDSLGNPTHILRIGESYKEKQRTIQAKKEVEQRRAGGYSRKYASKAKNLADDMVRNTARDLLYYAVTQDAMLIFENLSRGFGRQGKRTFMAERQYTRMEDWLTAKLAYEGLSKTYLSKTLAQYTSKTCSNCGFTITSADYDRVLEKLKKTATGWMTTINGKELKVEGQITYYNRRKRQNVVKDLSVELDRLSEESVNNDISSWTKGRSGEALSLLKKRFSHRPVQEKFVCLNCGFETHADEQAALNIARSWLFLRSQEYKKYQTNKTTGNTDKRAFVETWQSFYRKKLKEVWKPAVTSPKKKRKV

SEQ ID NO: 788 - protein, 997 aa, synthetic construct
  REGION 1..997: note = CasX 491 construct
MAPKKKRKVSRQEIKRINKIRRRLVKDSNTKKAGKTGPMKTLLVRVMTPDLRERLENLRKKPENIPQPISNTSRANLNKLLTDYTEMKKAILHVYWEEFQKDPVGLMSRVAQPASKKIDQNKLKPEMDEKGNLTTAGFACSQCGQPLFVYKLEQVSEKGKAYTNYFGRCNVAEHEKLILLAQLKPEKDSDEAVTYSLGKFGQRALDFYSIHVTKESTHPVKPLAQIAGNRYASGPVGKALSDACMGTIASFLSKYQDIIIEHQKVVKGNQKRLESLRELAGKENLEYPSVTLPPQPHTKEGVDAYNEVIARVRMWVNLNLWQKLKLSRDDAKPLLRLKGFPSFPLVERQANEVDWWDMVCNVKKLINEKKEDGKVFWQNLAGYKRQEALRPYLSSEEDRKKGKKFARYQLGDLLLHLEKKHGEDWGKVYDEAWERIDKKVEGLSKHIKLEEERRSEDAQSKAALTDWLRAKASFVIEGLKEADKDEFCRCELKLQKWYGDLRGKPFAIEAENSILDISGFSKQYNCAFIWQKDGVKKLNLYLIINYFKGGKLRFKKIKPEAFEANRFYTVINKKSGEIVPMEVNFNFDDPNLIILPLAFGKRQGREFIWNDLLSLETGSLKLANGRVIEKTLYNRRTRQDEPALFVALTFERREVLDSSNIKPMNLIGVDRGENIPAVIALTDPEGCPLSRFKDSLGNPTHILRIGESYKEKQRTIQAKKEVEQRRAGGYSRKYASKAKNLADDMVRNTARDLLYYAVTQDAMLIFENLSRGFGRQGKRTFMAERQYTRMEDWLTAKLAYEGLSKTYLSKTLAQYTSKTCSNCGFTITSADYDRVLEKLKKTATGWMTTINGKELKVEGQITYYNRYKRQNVVKDLSVELDRLSEESVNNDISSWTKGRSGEALSLLKKRFSHRPVQEKFVCLNCGFETHADEQAALNIARSWLFLRSQEYKKYQTNKTTGNTDKRAFVETWQSFYRKKLKEVWKPAVTSPKKKRKV

SEQ ID NO: 789 - protein, 997 aa, synthetic construct
  REGION 1..997: note = CasX 494 construct
MAPKKKRKVSRQEIKRINKIRRRLVKDSNTKKAGKTGPMKTLLVRVMTPDLRERLENLRKKPENIPQPISNTSRANLNKLLTDYTEMKKAILHVYWEEFQKDPVGLMSRVAQPASKKIDQNKLKPEMDEKGNLTTAGFACSQCGQPLFVYKLEQVSEKGKAYTNYFGRCNVAEHEKLILLAQLKPEKDSDEAVTYSLGKFGQRALDFYSIHVTRESNHPVKPLEQIGGNSCASGPVGKALSDACMGAVASFLTKYQDIILEHQKVIKKNEKRLANLKDIASANGLAFPKITLPPQPHTKEGIEAYNNVVAQIVIWVNLNLWQKLKIGRDEAKPLQRLKGFPSFPLVERQANEVDWWDMVCNVKKLINEKKEDGKVFWQNLAGYKRQEALRPYLSSEEDRKKGKKFARYQLGDLLLHLEKKHGEDWGKVYDEAWERIDKKVEGLSKHIKLEEERRSEDAQSKAALTDWLRAKASFVIEGLKEADKDEFCRCELKLQKWYGDLRGKPFAIEAENSILDISGFSKQYNCAFIWQKDGVKKLNLYLIINYFKGGKLRFKKIKPEAFEANRFYTVINKKSGEIVPMEVNFNFDDPNLIILPLAFGKRQGREFIWNDLLSLETGSLKLANGRVIEKTLYNRRTRQDEPALFVALTFERREVLDSSNIKPMNLIGVDRGENIPAVIALTDPEGCPLSRFKDSLGNPTHILRIGESYKEKQRTIQAKKEVEQRRAGGYSRKYASKAKNLADDMVRNTARDLLYYAVTQDAMLIFENLSRGFGRQGKRTFMAERQYTRMEDWLTAKLAYEGLSKTYLSKTLAQYTSKTCSNCGFTITSADYDRVLEKLKKTATGWMTTINGKELKVEGQITYYNRYKRQNVVKDLSVELDRLSEESVNNDISSWTKGRSGEALSLLKKRFSHRPVQEKFVCLNCGFETHADEQAALNIARSWLFLRSQEYKKYQTNKTTGNTDKRAFVETWQSFYRKKLKEVWKPAVTSPKKKRKV

SEQ ID NO: 790 - protein, 977 aa, synthetic construct; identical to SEQ ID NO: 258
  REGION 1..977: note = CasX protein variant

SEQ ID NO: 791 - protein, 978 aa, synthetic construct
  REGION 1..978: note = CasX protein variant
MQEIKRINKIRRRLVKDSNTKKAGKTGPMKTLLVRVMTPDLRERLENLRKKPENIPQPISNTSRANLNKLLTDYTEMKKAILHVYWEEFQKDPVGLMSRVAQPAPKNIDQRKLIPVKDGNERLTSSGFACSQCCQPLYVYKLEQVNDKGKPHTNYFGRCNVSEHERLILLSPHKPEANDELVTYSLGKFGQRALDFYSIHVTRESNHPVKPLEQIGGNSCASGPVGKALSDACMGAVASFLTKYQDIILEHQKVIKKNEKRLANLKDIASANGLAFPKITLPPQPHTKEGIEAYNNVVAQIVIWVNLNLWQKLKIGRDEAKPLQRLKGFPSFPLVERQANEVDWWDMVCNVKKLINEKKEDGKVFWQNLAGYKRQEALLPYLSSEEDRKKGKKFARYQFGDLLLHLEKKHGEDWGKVYDEAWERIDKKVEGLSKHIKLEEERRSEDAQSKAALTDWLRAKASFVIEGLKEADKDEFCRCELKLQKWYGDLRGKPFAIEAENSILDISGFSKQYNCAFIWQKDGVKKLNLYLIINYFKGGKLRFKKIKPEAFEANRFYTVINKKSGEIVPMEVNFNFDDPNLIILPLAFGKRQGREFIWNDLLSLETGSLKLANGRVIEKTLYNRRTRQDEPALFVALTFERREVLDSSNIKPMNLIGIDRGENIPAVIALTDPEGCPLSRFKDSLGNPTHILRIGESYKEKQRTIQAAKEVEQRRAGGYSRKYASKAKNLADDMVRNTARDLLYYAVTQDAMLIFENLSRGFGRQGKRTFAAERQYTRMEDWLTAKLAYEGLPSKTYLSKTLAQYTSKTCSNCGFTITSADYDRVLEKLKKTATGWMTTINGKELKVEGQITYYNRYKRQNVVKDLSVELDRLSEESVNNDISSWTKGRSGEALSLLKKRFSHRPVQEKFVCLNCGFETHADEQAALNIARSWLFLRSQEYKKYQTNKTTGNTDKRAFVETWQSFYRKKLKEVWKPAV

SEQ ID NO: 792 - protein, 977 aa, synthetic construct; identical to SEQ ID NO: 260
  REGION 1..977: note = CasX protein variant

SEQ ID NO: 793 - protein, 978 aa, synthetic construct; identical to SEQ ID NO: 261
  REGION 1..978: note = CasX protein variant

SEQ ID NO: 794 - protein, 978 aa, synthetic construct; identical to SEQ ID NO: 262
  REGION 1..978: note = CasX protein variant

SEQ ID NO: 795 - protein, 978 aa, synthetic construct; identical to SEQ ID NO: 263
  REGION 1..978: note = CasX protein variant

SEQ ID NO: 796 - protein, 977 aa, synthetic construct; identical to SEQ ID NO: 264
  REGION 1..977: note = CasX protein variant

SEQ ID NO: 797 - protein, 977 aa, synthetic construct; identical to SEQ ID NO: 265
  REGION 1..977: note = CasX protein variant

SEQ ID NO: 798 - protein, 977 aa, synthetic construct; identical to SEQ ID NO: 266
  REGION 1..977: note = CasX protein variant

SEQ ID NO: 799 - protein, 977 aa, synthetic construct; identical to SEQ ID NO: 267
  REGION 1..977: note = CasX protein variant

SEQ ID NO: 800 - protein, 978 aa, synthetic construct; identical to SEQ ID NO: 268
  REGION 1..978: note = CasX protein variant

SEQ ID NO: 801 - protein, 977 aa, synthetic construct; identical to SEQ ID NO: 269
  REGION 1..977: note = CasX protein variant

SEQ ID NO: 802 - protein, 977 aa, synthetic construct; identical to SEQ ID NO: 270
  REGION 1..977: note = CasX protein variant

SEQ ID NO: 803 - protein, 977 aa, synthetic construct; identical to SEQ ID NO: 271
  REGION 1..977: note = CasX protein variant

SEQ ID NO: 804 - protein, 977 aa, synthetic construct; identical to SEQ ID NO: 272
  REGION 1..977: note = CasX protein variant

SEQ ID NO: 805 - protein, 977 aa, synthetic construct; identical to SEQ ID NO: 273
  REGION 1..977: note = CasX protein variant

SEQ ID NO: 806 - protein, 978 aa, synthetic construct; identical to SEQ ID NO: 274
  REGION 1..978: note = CasX protein variant

SEQ ID NO: 807 - protein, 978 aa, synthetic construct; identical to SEQ ID NO: 275
  REGION 1..978: note = CasX protein variant

SEQ ID NO: 808 - protein, 977 aa, synthetic construct; identical to SEQ ID NO: 276
  REGION 1..977: note = CasX protein variant

SEQ ID NO: 809 - protein, 977 aa, synthetic construct; identical to SEQ ID NO: 277
  REGION 1..977: note = CasX protein variant

SEQ ID NO: 810 - protein, 977 aa, synthetic construct; identical to SEQ ID NO: 278
  REGION 1..977: note = CasX protein variant

SEQ ID NO: 811 - protein, 978 aa, synthetic construct; identical to SEQ ID NO: 279
  REGION 1..978: note = CasX protein variant

SEQ ID NO: 812 - protein, 978 aa, synthetic construct; identical to SEQ ID NO: 280
  REGION 1..978: note = CasX protein variant

SEQ ID NO: 813 - protein, 977 aa, synthetic construct; identical to SEQ ID NO: 281
  REGION 1..977: note = CasX protein variant

SEQ ID NO: 814 - protein, 978 aa, synthetic construct; identical to SEQ ID NO: 282
  REGION 1..978: note = CasX protein variant

SEQ ID NO: 815 - protein, 977 aa, synthetic construct
  REGION 1..977: note = CasX protein variant
MQEIKRINKIRRRLVKDSNTKKAGKTGPMKTLLVRVMTPDLRERLENLRKKPENIPQPISNTSRANLNKLLTDYTEMKKAILHVYWEEFQKDPVGLMSRVAQPAPKNIDQRKLIPVKDGNERLTSSGFACSQCCQPLYVYKLEQVNDKGKPHTNYFGRCNVSEHERLILLSPHKPEANDELVTYSLGKFGQRALDFYSIHVTRESNHPVKPLEQIGGNSCASGPVGKALSDACMGAVASFLTKYQDIILEHQKVIKKNEKRLANLKDIASANGLAFPKITLPPQPHTKEGIEAYNNVVAQIVIWVNLNLWQKLKIGRDEAKPLQRLKGFPSFPLVERQANEVDWWDMVCNVKKLINEKKEDGKVFWQNLAGYKRQEALRPYLSSEEDRKKGKKFARYQFGDLLLHLEKKHGEDWGKVYDEAWERIDKKVEGLSKHIKLEEERRSEDAQSKAALTDWLRAKASFVIEGLKEADKDEFCRCELKLQKWYGDLRGKPFAIEAENSILDISGFSKQYNCAFIWQKDGVKKLNLYLIINYFKGGKLRFKKIKPEAFEANRFYTVINKKSGEIVPMEVNFNFDDPNLIILPLAFGKRQGREFIWNDLLSLETGSLKLANGRVIEKTLYNRRTRQDEPALFVALTFERREVLDSSNIKPMNLIGIDRGENIPAVIALTDPEGCPLSRFKDSLGNPTHILRIGESYKEKQRTIQAKKEVEQRRAGGYSRKYASKAKNLADDMVRNTARDLLYYAVTQDAMLIFENLSRGFGRQGKRTFMAERQYTRMEDWLTAKLAYEMLSKTYLSKTLAQYTSKTCSNCGFTITSADYDRVLEKLKKTATGWMTTINGKELKVEGQITYYNRYKRQNVVKDLSVELDRLSEESVNNDISSWTKGRSGEALSLLKKRFSHRPVQEKFVCLNCGFETHADEQAALNIARSWLFLRSQEYKKYQTNKTTGNTDKRAFVETWQSFYRKKLKEVWKPAV

SEQ ID NO: 816 - protein, 977 aa, synthetic construct
  REGION 1..977: note = CasX protein variant
MQEIKRINKIRRRLVKDSNTKKAGKTGPMKTLLVRVMTPDLRERLENLRKKPENIPQPISNTSRANLNKLLTDYTEMKKAILHVYWEEFQKDPVGLMSRVAQPAPKNIDQRKLIPVKDGNERLTSSGFACSQCCQPLYVYKLEQVNDKGKPHTNYFGRCNVSEHERLILLSPHKPEANDELVTYSLGKFGQRALDFYSIHVTRESNHPVKPLEQIGGNSCASGPVGKALSDACMGAVASFLTKYQDIILEHQKVIKKNEKRLANLKDIASANGLAFPKITLPPQPHTKEGIEAYNNVVAQIVIWVNLNLWQKLKIGRDEAKPLQRLKGFPSFPLVERQANEVDWWDMVCNVKKLINEKKEDGKVFWQNLAGYKRQEALLPYLSSERDRKKGKKFARYQLGDLLLHLEKKHGEDWGKVYDEAWERIDKKVEGLSKHIKLEEERRSEDAQSKAALTDWLRAKASFVIEGLKEADKDEFCRCELKLQKWYGDLRGKPFAIEAENSILDISGFSKQYNCAFIWQKDGVKKLNLYLIINYFKGGKLRFKKIKPEAFEANRFYTVINKKSGEIVPMEVNFNFDDPNLIILPLAFGKRQGREFIWNDLLSLETGSLKLANGRVIEKTLYNRRTRQDEPALFVALTFERREVLDSSNIKPMNLIGIDRGENIPAVIALTDPEGCPLSRFKDSLGNPTHILRIGESYKEKQRTIQAAKEVEQRRAGGYSRKYASKAKNLADDMVRNTARDLLYYAVTQDAMLIFENLSRGFGRQGKRTFMAERQYTRMEDWLTAKLAYEGLSKTYLSKTLAQYTSKTCSNCGFTITSADYDRVLEKLKKTATGWMTTINGKELKVEGQITYYNRYKRQNVVKDLSVELDRLSEESVNNDISSWTKGRSGEALSLLKKRFSHRPVQEKFVCLNCGFETHADEQAALNIARSWLFLRSQEYKKYQTNKTTGNTDKRAFVETWQSFYRKKLKEVWKPAV

SEQ ID NO: 817 - protein, 977 aa, synthetic construct
  REGION 1..977: note = CasX protein variant
MQEIKRINKIRRRLVKDSNTKKAGKTGPMKTLLVRVMTPDLRERLENLRKKPENIPQPISNTSRANLNKLLTDYTEMKKAILHVYWEEFQKDPVGLMSRVAQPAPKNIDQRKLIPVKDGNERLTSSGFACSQCCQPLYVYKLEQVNDKGKPHTNYFGRCNVSEHERLILLSPHKPEANDELVTYSLGKFGQRALDFYSIHVTRESNHPVKPLEQIGGNSCASGPVGKALSDACMGAVASFLTKYQDIILEHQKVIKKNEKRLANLKDIASANGLAFPKITLPPQPHTKEGIEAYNNVVAQIVIWVNLNLWQKLKIGRDEAKPLQRLKGFPSFPLVERQANEVDWWDMVCNVKKLINEKKEDGKVFWQNLAGYKRQEALLPYLSSEEDRKKGKKFARYQFGDLLLHLEKKHGEDWGKVYDEAWERIDKKVEGLSKHIKLEEERRSEDAQSKAALTDWLRAKASFVIEGLKEADKDEFCRCELKLQKWYGDLRGKPFAIEAENSILDISGFSKQYNCAFIWQKDGVKKLNLYLIINYFKGGKLRFKKIKPEAFEANRFYTVINKKSGEIVPMEVNFNFDDPNLIILPLAFGKRQGREFIWNDLLSLETGSLKLANGRVIEKTLYNRRTRQDEPALFVALTFERREVLDSSNIKPMNLIGIDRGENIPAVIALTDPEGCPLSRFKDSLGNPTHILRIGESYKEKQRTIQAKKEVEQRRAGGYSRKYASKAKNLADDMVRNTARDLLYYAVTQDAMLIFENLSRGFGRQGKRTFMAERQYTRMEDWLTAKLAYEGLSKTYLSKTLAQYTSKTCSNCGFTITSADYDRVLEKLKKTATGWMTTINGKELKVEGQITYYNRYKRQNVVKDLSVELDRLSEESVNNDISSWTKGRSGEALSLLKKRFSHRPVQEKFVCLNCGFETHADEQAALNIARSWLFLRSQEYKKYQTNKTTGNTDKRAFVETWQSFYRKKLKEVWKPAV

SEQ ID NO: 818 - protein, 978 aa, synthetic construct
  REGION 1..978: note = CasX protein variant
MQEIKRINKIRRRLVKDSNTKKAGKTGPMKTLLVRVMTPDLRERLENLRKKPENIPQPISNTSRANLNKLLTDYTEMKKAILHVYWEEFQKDPVGLMSRVAQPAPKNIDQRKLIPVKDGNERLTSSGFACSQCCQPLYVYKLEQVNDKGKPHTNYFGRCNVSEHERLILLSPHKPEANDELVTYSLGKFGQRALDFYSIHVTRESNHPVKPLEQIGGNSCASGPVGKALSDACMGAVASFLTKYQDIILEHQKVIKKNEKRLANLKDIASANGLAFPKITLPPQPHTKEGIEAYNNVVAQIVIWVNLNLWQKLKIGRDEAKPLQRLKGFPSFPLVERQANEVDWWDMVCNVKKLINEKKEDGKVFWQNLAGYKRQEALLPYLSSEEDRKKGKKFARYQFGDLLKHLEKKHGEDWGKVYDEAWERIDKKVEGLSKHIKLEEERRSEDAQSKAALTDWLRAKASFVIEGLKEADKDEFCRCELKLQKWYGDLRGKPFAIEAENSILDISGFSKQYNCAFIWQKDGVKKLNLYLIINYFKGGKLRFKKIKPEAFEANRFYTVINKKSGEIVPMEVNFNFDDPNLIILPLAFGKRQGREFIWNDLLSLETGSLKLANGRVIEKTLYNRRTRQDEPALFVALTFERREVLDSSNIKPMNLIGIDRGENIPAVIALTDPEGCPLSRFKDSLGNPTHILRIGESYKEKQRTIQAAKEVEQRRAGGYSRKYASKAKNLADDMVRNTARDLLYYAVTQDAMLIFENLSRGFGRQGKRTFMAERQYTRMEDWLTAKLAYEGLPSKTYLSKTLAQYTSKTCSNCGFTITSADYDRVLEKLKKTATGWMTTINGKELKVEGQITYYNRYKRQNVVKDLSVELDRLSEESVNNDISSWTKGRSGEALSLLKKRFSHRPVQEKFVCLNCGFETHADEQAALNIARSWLFLRSQEYKKYQTNKTTGNTDKRAFVETWQSFYRKKLKEVWKPAV

SEQ ID NO: 819 - protein, 978 aa, synthetic construct
  REGION 1..978: note = CasX protein variant
MQEIKRINKIRRRLVKDSNTKKAGKTGPMKTLLVRVMTPDLRERLENLRKKPENIPQPISNTSRANLNKLLTDYTEMKKAILHVYWEEFQKDPVGLMSRVAQPAPKNIDQRKLIPVKDGNERLTSSGFACSQCCQPLYVYKLEQVNDKGKPHTNYFGRCNVSEHERLILLSPHKPEANDELVTYSLGKFGQRALDFYSIHVTRESNHPVKPLEQIGGNSCASGPVGKALSDACMGAVASFLTKYQDIILEHQKVIKKNEKRLANLKDIASANGLAFPKITLPPQPHTKEGIEAYNNVVAQIVIWVNLNLWQKLKIGRDEAKPLQRLKGFPSFPLVERQANEVDWWDMVCNVKKLINEKKEDGKVFWQNLAGYKRQEALLPYLSSEEDRKKGKKFARYQFGDLLLHLEKKHGEDWGKVYDEAWERIDKKVEGLSKHIKLEEERRSEDAQSKAALTDWLRAKASFVIEGLKEADKDEFCRCELKLQKWYGDLRGKPFAIEAENSILDISGFSKQYNCAFIWQKDGVKKLNLYLIINYFKGGKLRFKKIKPEAFAANRFYTVINKKSGEIVPMEVNFNFDDPNLIILPLAFGKRQGREFIWNDLLSLETGSLKLANGRVIEKTLYNRRTRQDEPALFVALTFERREVLDSSNIKPMNLIGIDRGENIPAVIALTDPEGCPLSRFKDSLGNPTHILRIGESYKEKQRTIQAAKEVEQRRAGGYSRKYASKAKNLADDMVRNTARDLLYYAVTQDAMLIFENLSRGFGRQGKRTFMAERQYTRMEDWLTAKLAYEGLPSKTYLSKTLAQYTSKTCSNCGFTITSADYDRVLEKLKKTATGWMTTINGKELKVEGQITYYNRYKRQNVVKDLSVELDRLSEESVNNDISSWTKGRSGEALSLLKKRFSHRPVQEKFVCLNCGFETHADEQAALNIARSWLFLRSQEYKKYQTNKTTGNTDKRAFVETWQSFYRKKLKEVWKPAV

SEQ ID NO: 820 - protein, 978 aa, synthetic construct
  REGION 1..978: note = CasX protein variant
MQEIKRINKIRRRLVKDSNTKKAGKTGPMKTLLVRVMTPDLRERLENLRKKPENIPQPISNTSRANLNKLLTDYTEMKKAILHVYWEEFQKDPVGLMSRVAQPAPKNIDQRKLIPVKDGNERLTSSGFACSQCCQPLYVYKLEQVNDKGKPHTNYFGRCNVSEHERLILLSPHKPEANDELVTYSLGKFGQRALDFYSIHVTRESNHPVKPLEQIGGNSCASGPVGKALSDACMGAVASFLTKYQDIILEHQKVIKKNEKRLANLKDIASANGLAFPKITLPPQPHTKEGIEAYNNVVAQIVIWVNLNLWQKLKIGRDEAKPLQRLKGFPSFPLVERQANEVDWWDMVCNVKKLINEKKEDGKVFWQNLAGYKRQEALLPYLSSEEDRKKGKKFARYQFGDLLLHLEKKHGEDWGKVYDEAWERIDKKVEGLSKHIKLEEERRSEDAQSKAALTDWLRAKASFVIEGLKEADKDEFCRCELKLQKWYGDLRGKPFAIEAENSILDISGFSKQYNCAFIWQKDGVKKLNLYLIINYFKGGKLRFKKIKPEAFEANRFYTVINKKSGEIVPMEVNFNFDDPNLIILPLAFGKRQGREFIWNDLLSLETGSLKLANGRVIEKTLYNRRTRQDEPALFVALTFERREVLDSSNIKPMNLIGIDRGENIPAVIALTDPEGCPLSRFKDSLGNPTHILRIGESYKEKQRTIQAKKEVEQRRAGGYSRKYASKAKNLADDMVRNTARDLLYYAVTQDAMLIFENLSRGFGRQGKRTFMAERQYTRMEDWLTAKLAYEGLPSKTYLSKTLAQYTSKTCSNCGFTITSADYDRVLEKLKKTATGWMTTINGKELKVEGQITYYNRYKRQNVVKDLSVELDRLSEESVNNDISSWTKGRSGEALSLLKKRFSHRPVQEKFVCLNCGFETHADEQAALNIARSWLFLRSQEYKKYQTNKTTGNTDKRAFVETWQSFYRKKLKEVWKPAV

SEQ ID NO: 821 - protein, 978 aa, synthetic construct
  REGION 1..978: note = CasX protein variant
MQEIKRINKIRRRLVKDSNTKKAGKTGPMKTLLVRVMTPDLRERLENLRKKPENIPQPISNTSRANLNKLLTDYTEMKKAILHVYWEEFQKDPVGLMSRVAQPAPKNIDQRKLIPVKDGNERLTSSGFACSQCCQPLYVYKLEQVNDKGKPHTNYFGRCNVSEHERLILLSPHKPEANDELVTYSLGKFGQRALDFYSIHVTRESNHPVKPLEQIGGNSCASGPVGKALSDACMGAVASFLTKYQDIILEHQKVIKKNEKRLANLKDIASANGLAFPKITLPPQPHTKEGIEAYNNVVAQIVIWVNLNLWQKLKIGRDEAKPLQRLKGFPSFPLVERQANEVDWWDMVCNVKKLINEKKEDGKVFWQNLAGYKRQEALLPYLSSEEDRKKGKKFARYQFGDLLLHLEKKHGEDWGKVYDEAWERIDKKVEGLSKHIKLEEERRSEDAQSKAALTDWLRAKASFVIEGLKEADKDEFCRCELKLQKWYGDLRGKPFAIEAENSILDISGFSKQYNCAFIWQKDGVKKLNLYLIINYFKGGKLRFKKIKPEAFEANRFYTVINKKSGEIVPMEVNFNFDDPNLIILPLAFGKRQGREFIWNDLLSLETGSLKLANGRVIEKTLYNRRTRQDEPALFVALTFERREVLDSSNIKPMNLIGIDRGENIPAVIALTDPEGCPLSRFKDSLGNPTHILRIGESYKEKQRTIQAAKEVEQRRAGGYSRKYASKAKNLADDMVRNTARDLLYYAVTQDAMLIFENLSRGFGRQGKRTFMAERQYTRNEDWLTAKLAYEGLPSKTYLSKTLAQYTSKTCSNCGFTITSADYDRVLEKLKKTATGWMTTINGKELKVEGQITYYNRYKRQNVVKDLSVELDRLSEESVNNDISSWTKGRSGEALSLLKKRFSHRPVQEKFVCLNCGFETHADEQAALNIARSWLFLRSQEYKKYQTNKTTGNTDKRAFVETWQSFYRKKLKEVWKPAV

SEQ ID NO: 822 - protein, 978 aa, synthetic construct
  REGION 1..978: note = CasX protein variant
MQEIKRINKIRRRLVKDSNTKKAGKTGPMKTLLVRVMTPDLRERLENLRKKPENIPQPISNTSRANLNKLLTDYTEMKKAILHVYWEEFQKDPVGLMSRVAQPAPKNIDQRKLIPVKDGNERLTSSGFACSQCCQPLYVYKLEQVNDKGKPHTNYFGRCNVSEHERLILLSPHKPEANDELVTYSLGKFGQRALDFYSIHVTRESNHPVKPLEQIGGNSCASGPVGKALSDACMGAVASFLTKYQDIILEHQKVIKKNEKRLANLKDIASANGLAFPKITLPPQPHTKEGIEAYNNVVAQIVIWVNLNLWQKLKIGRDEAKPLQRLKGFPSFPLVERQANEVDWWDMVCNVKKLINEKKEDGKVFWQNLAGYKRQEALLPYLSSEEDRKKGKKFARYQFGDLLLHLEKKHGEDWGKVYDEAWERIDKKVEGLSKHIKLEEERRSEDAQSKAALTDWLRAKASFVIEGLKEADKDEFCRCELKLQKWYGDLRGKPFAIEAENSILDISGFSKQYNCAFIWQKDGVKKLNLYLIINYFKGGKLRFKKIKPEAFEANRFYTVINKKSGEIVPMEVNFNFDDPNLIILPLAFGKRQGREFIWNDLLSLETGSLKLANGRVIEKTLYNRRTRQDEPALFVALTFERREVLDSSNIKPMNLIGIDRGENIPAVIALTDPEGCPLSRFKDSLGNPTHILRIGESYKEKQRTIQAAKEVEQRRAGGYSRKYASKAKNLADDMVRNTARDLLYYAVTQDAMLIFENLSRGFGRQGKRTFMAERQYTRMEDWLTAKLAYEGLGSKTYLSKTLAQYTSKTCSNCGFTITSADYDRVLEKLKKTATGWMTTINGKELKVEGQITYYNRYKRQNVVKDLSVELDRLSEESVNNDISSWTKGRSGEALSLLKKRFSHRPVQEKFVCLNCGFETHADEQAALNIARSWLFLRSQEYKKYQTNKTTGNTDKRAFVETWQSFYRKKLKEVWKPAV

SEQ ID NO: 823 - protein, 977 aa, synthetic construct
  REGION 1..977: note = CasX protein variant
MQEIKRINKIRRRLVKDSNTKKAGKTGPMKTLLVRVMTPDLRERLENLRKKPENIPQPISNTSRANLNKLLTDYTEMKKAILHVYWEEFQKDPVGLMSRVAQPAPKNIDQRKLIPVKDGNERLTSSGFACSQCCQPLYVYKLEQVNDKGKPHTNYFGRCNVSEHERLILLSPHKPEANDELVTYSLGKFGQRALDFYSIHVTRESNHPVKPLEQIGGNSCASGPVGKALSDACMGAVASFLTKYQDIILEHQKVIKKNEKRLANLKDIASANGLAFPKITLPPQPHTKEGIEAYNNVVAQIVIWVNLNLWQKLKIGRDEAKPLQRLKGFPSFPLVERQANEVDWWDMVCNVKKLINEKKEDGKVFWQNLAGYKRQEALRPYLSSEEDRKKGKKFARYQFGDLLLHLEKKHGEDWGKVYDEAWERIDKKVEGLSKHIKLEEERRSEDAQSKAALTDWLRAKASFVIEGLKEADKDEFKRCELKLQKWYGDLRGKPFAIEAENSILDISGFSKQYNCAFIWQKDGVKKLNLYLIINYFKGGKLRFKKIKPEAFEANRFYTVINKKSGEIVPMEVNFNFDDPNLIILPLAFGKRQGREFIWNDLLSLETGSLKLANGRVIEKTLYNRRTRQDEPALFVALTFERREVLDSSNIKPMNLIGIDRGENIPAVIALTDPEGCPLSRFKDSLGNPTHILRIGESYKEKQRTIQAKKEVEQRRAGGYSRKYASKAKNLADDMVRNTVRDLLYYAVTQDAMLIFENLSRGFGRQGKRTFMAERQYTRMEDWLTAKLAYEGLSKTYLSKTLAQYTSKTCSNCGFTITSADYDRVLEKLKKTATGWMTTINGKELKVEGQITYYNRYKRQNVVKDLSVELDRLSEESVNNDISSWTKGRSGEALSLLKKRFSHRPVQEKFVCLNCGFETHADEQAALNIARSWLFLRSQEYKKYQTNKTTGNTDKRAFVETWQSFYRKKLKEVWKPAV

SEQ ID NO: 824 - protein, 978 aa, synthetic construct
  REGION 1..978: note = CasX protein variant
MQEIKRINKIRRRLVKDSNTKKAGKTGPMKTLLVRVMTPDLRERLENLRKKPENIPQPISNTSRANLNKLLTDYTEMKKAILHVYWEEFQKDPVGLMSRVAQPAPKNIDQRKLIPVKDGNERLTSSGFACSQCCQPLYVYKLEQVNDKGKPHTNYFGRCNVSEHERLILLSPHKPEANDELVTYSLGKFGQRALDFYSIHVTRESNHPVKPLEQIGGNSCASGPVGKALSDACMGAVASFLTKYQDIILEHQKVIKKNEKRLANLKDIASANGLAFPKITLPPQPHTKEGIEAYNNVVAQIVIWVNLNLWQKLKIGRDEAKPLQRLKGFPSFPLVERQANEVDWWDMVCNVKKLINEKKEDGKVFWQNLAGYKRQEALLPYLSSEEDRKKGKKFARYQFGDLLLHLEKKHGEDWGKVYDEAWERIDKKVEGLSKHIKLEEERRSEDAQSKAALTDWLRAKASFVIEGLKEADKDEFCRCELKLQKWYGDLRGKPFAIEAENSILDISGFSKQYNCAFIWQKDGVKKLNLYLIINYFKGGKLRFKKIKPEAFEANRFYTVINKKSGEIVPMEVNFNFDDPNLIILPLAFGKRQGREFIWNDLLSLETGSLKLANGRVIEKTLYNRRTRQDEPALFVALTFERREVLDSSNIKPMNLIGIDRGENIPAVIALTDPEGCPLSRFKDSLGNPTHILRIGESYKEKQRTIQAAKEVEQRRAGGYSRKYASKAKNLADDMVRNTARDLLYYAVTQDAMLIFENLSRGFGRQGKRTFMAERQYTRMEDWLTAKLAYEGKPSKTYLSKTLAQYTSKTCSNCGFTITSADYDRVLEKLKKTATGWMTTINGKELKVEGQITYYNRYKRQNVVKDLSVELDRLSEESVNNDISSWTKGRSGEALSLLKKRFSHRPVQEKFVCLNCGFETHADEQAALNIARSWLFLRSQEYKKYQTNKTTGNTDKRAFVETWQSFYRKKLKEVWKPAV

SEQ ID NO: 825 - protein, 977 aa, synthetic construct
  REGION 1..977: note = CasX protein variant
MQEIKRINKIRRRLVKDSNTKKAGKTGPMKTLLVRVMTPDLRERLENLRKKPENIPQPISNTSRANLNKLLTDYTEMKKAILHVYWEEFQKDPVGLMSRVAQPAPKNIDQRKLIPVKDGNERLTSSGFACSQCCQPLYVYKLEQVNDKGKPHTNYFGRCNVSEHERLILLSPHKPEANDELVTYSLGKFGQRALDFYSIHVTRESNHPVKPLEQIGGNSCASGPVGKALSDACMGAVASFLTKYQDIILEHQKVIKKNEKRLANLKDIASANGLAFPKITLPPQPHTKEGIEAYNNVVAQIVIWVNLNLWQKLKIGRDEAKPLQRLKGFPSFPLVERQANEVDWWDMVCNVKKLINEKKEDGKVFWQNLAGYKRQEALRPYLSSEEDRKKGKKFARYQFGDLLLHLEKKHGEDWGKVYDEAWERIDKKVEGLSKHIKLEEERRSEDAQSKAALTDWLRAKASFVIEGLKEADKDEFCRCELKLQKWYGDLRGKPFAIEAENSILDISGFSKQYNCAFIWQKDGVKKLNLYLIINYFKGGKLRFKKIKPEAFEANRFYTVINKKSGEIVPMEVNFNFDDPNLIILPLAFGKRQGREFIWNDLLSLETGSLKLANGRVIEKTLYNRRTRQDEPALFVALTFERREVLDSSNIKPMNLIGIDRGENIPAVIALTDPEGCPLSRFKDSLGNPTHILRIGESYKEKQRTIQAKKEVEQRRAGGYSRKYASKAKNLADDMVRNTARDLLYYAVTQDAMLIFENLSRGFGRQGKRTFMAERQYTRNEDWLTAKLAYEGLSKTYLSKTLAQYTSKTCSNCGFTITSADYDRVLEKLKKTATGWMTTINGKELKVEGQITYYNRYKRQNVVKDLSVELDRLSEESVNNDISSWTKGRSGEALSLLKKRFSHRPVQEKFVCLNCGFETHADEQAALNIARSWLFLRSQEYKKYQTNKTTGNTDKRAFVETWQSFYRKKLKEVWKPAV

SEQ ID NO: 826 - protein, 980 aa, synthetic construct
  REGION 1..980: note = CasX protein variant
MQEIKRINKIRRRLVKDSNTKKAGKTGPMKTLLVRVMTPDLRERLENLRKKPENIPQPISNTSRANLNKLLTDYTEMKKAILHVYWEEFQKDPVGLMSRVAQPAPKNIDQRKLIPVKDGNERLTSSGFACSQCCQPLYVYKLEQVNDKGKPHTNYFGRCNVSEHERLILLSPHKPEANDELVTYSLGKFGQRALDFYSIHVTRESNHPVKPLEQIGGNSCASGPVGKALSDACMGAVASFLTKYQDIILEHQKVIKKNEKRLANLKDIASANGLAFPKITLPPQPHTKEGIEAYNNVVAQIVIWVNLNLWQKLKIGRDEAKPLQRLKGFPSFPLVERQANEVDWWDMVCNVKKLINEKKEDGKVFWQNLAGYKRQEALLPYLSSEEDRKKGKKFARYQFGDLLLHLEKKHGEDWGKVYDEAWERIDKKVEGLSKHIKLEEERRSEDAQSKAALTDWLRAKASFVIEGLKEADKDEFCRCELKLQKWYGDLRGKPFAIEAENSILDISGFSKQYNCAFIWQKDGVKKLNLYLIINYFKGGKLRFKKIKPEAFEANRFYTVINKKSGEIVPMEVNFNFDDPNLIILPLAFGKRQGREFIWNDLLSLETGSLKLANGRVIEKTLYNRRTRQDEPALFVALTFERREVLDSSNIKPMNLIGIDRGENIPAVIALTDPEGCPLSRFKDSLGNPTHILRIGESYKEKQRTIQAAKEVEQRRAGGYSRKYASKAKNLADDMVRNTARDLLYYAVTQDAMLIFENLSRGFGRQGKRTFMAERQYTRMEDWLTAKLAYEGLPSKTASYLSKTLAQYTSKTCSNCGFTITSADYDRVLEKLKKTATGWMTTINGKELKVEGQITYYNRYKRQNVVKDLSVELDRLSEESVNNDISSWTKGRSGEALSLLKKRFSHRPVQEKFVCLNCGFETHADEQAALNIARSWLFLRSQEYKKYQTNKTTGNTDKRAFVETWQSFYRKKLKEVWKPAV

SEQ ID NO: 827 - protein, 978 aa, synthetic construct
  REGION 1..978: note = CasX protein variant
MQEIKRINKIRRRLVKDSNTKKAGKTGPMKTLLVRVMTPDLRERLENLRKKPENIPQPISNTSRANLNKLLTDYTEMKKAILHVYWEEFQKDPVGLMSRVAQPAPKNIDQRKLIPVKDGNERLTSSGFACSQCCQPLYVYKLEQVNDKGKPHTNYFGRCNVSEHERLILLSPHKPEANDELVTYSLGKFGQRALDFYSIHVTRESNHPVKPLEQIGGNSCASGPVGKALSDACMGAVASFLTKYQDIILEHQKVIKKNEKRLANLKDIASANGLAFPKITLPPQPHTKEGIEAYNNVVAQIVIWVNLNLWQKLKIGRDEAKPLQRLKGFPSFPLVERQANEVDWWDMVCNVKKLINEKKEDGKVFWQNLAGYKRQEALLPYLSSEEDRKKGKKFARYQFGDLLLHLEKKHGEDWGKVYDEAWERIDKKVEGLSKHIKLEEERRSEDAQSKAALTDWLRAKASFVIEGLKEADKDEFHRCELKLQKWYGDLRGKPFAIEAENSILDISGFSKQYNCAFIWQKDGVKKLNLYLIINYFKGGKLRFKKIKPEAFEANRFYTVINKKSGEIVPMEVNFNFDDPNLIILPLAFGKRQGREFIWNDLLSLETGSLKLANGRVIEKTLYNRRTRQDEPALFVALTFERREVLDSSNIKPMNLIGIDRGENIPAVIALTDPEGCPLSRFKDSLGNPTHILRIGESYKEKQRTIQAAKEVEQRRAGGYSRKYASKAKNLADDMVRNTARDLLYYAVTQDAMLIFENLSRGFGRQGKRTFMAERQYTRMEDWLTAKLAYEGLPSKTYLSKTLAQYTSKTCSNCGFTITSADYDRVLEKLKKTATGWMTTINGKELKVEGQITYYNRYKRQNVVKDLSVELDRLSEESVNNDISSWTKGRSGEALSLLKKRFSHRPVQEKFVCLNCGFETHADEQAALNIARSWLFLRSQEYKKYQTNKTTGNTDKRAFVETWQSFYRKKLKEVWKPAV

SEQ ID NO: 828 - protein, 978 aa, synthetic construct
  REGION 1..978: note = CasX protein variant
MQEIKRINKIRRRLVKDSNTKKAGKTGPMKTLLVRVMTPDLRERLENLRKKPENIPQPISNTSRANLNKLLTDYTEMKKAILHVYWEEFQKDPVGLMSRVAQPAPKNIDQRKLIPVKDGNERLTSSGFACSQCCQPLYVYKLEQVNDKGKPHTNYFGRCNVSEHERLILLSPHKPEANDELVTYSLGKFGQRALDFYSIHVTRESNHPVKPLEQIGGNSCASGPVGKALSDACMGAVASFLTKYQDIILEHQKVIKKNEKRLANLKDIASANGLAFPKITLPPQPHTKEGIEAYNNVVAQIVIWVNLNLWQKLKIGRDEAKPLQRLKGFPSFPLVERQANEVDWWDMVCNVKKLINEKKEDGKVFWQNLAGYKRQEALLPYLSSEEDRKKGKKFARYQFGDLLLHLEKKHGEDWGKVYDEAWERIDKKVEGLSKHIKLEEERRSEDAQSKAALTDWLRAKASFVIEGLKEADKDEFCRCELKLQKWYGDLRGKPFAIEAENSILDISGFSKQYNCAFIWQKDGVKKLNLYLIINYFKGGKLRFKKIKPEAFEANRFYTVINKKSGEIVPMEVNFNFDDPNLIILPLAFGKRQGREFIWNDLLSLETGSLKLANGRVIEKTLYNRRTRQDEPALFVALTFERREVLDSSNIKPMNLIGIDRGENIPAVIALTDPEGCPLSRFKDSLGNPTHILRIGESYKEKQRTIQAAKEVEQRRAGGYSRKYASKAKNLADDMVRNTARDLLYYAVTQDAMLIFENLSRGFGRQGKRTFMAERQYTRMEDWLTAKLAYEGLPSKTYLSKTLAQYTSKTCSNCGFTITSADYDRVLEKLKKTATGWMTTINGKELKVEGQITYYNRRKRQNVVKDLSVELDRLSEESVNNDISSWTKGRSGEALSLLKKRFSHRPVQEKFVCLNCGFETHADEQAALNIARSWLFLRSQEYKKYQTNKTTGNTDKRAFVETWQSFYRKKLKEVWKPAV

SEQ ID NO: 829 - protein, 978 aa, synthetic construct
  REGION 1..978: note = CasX protein variant
MQEIKRINKIRRRLVKDSNTKKAGKTGPMKTLLVRVMTPDLRERLENLRKKPENIPQPISNTSRANLNKLLTDYTEMKKAILHVYWEEFQKDPVGLMSRVAQPAPKNIDQRKLIPVKDGNERLTSSGFACSQCCQPLYVYKLEQVNDKGKPHTNYFGRCNVSEHERLILLSPHKPEANDELVTYSLGKFGQRALDFYSIHVTRESNHPVKPLEQIGGNSCASGPVGKALSDACMGAVASFLTKYQDIILEHQKVIKKNEKRLANLKDIASANGLAFPKITLPPQPHTKEGIEAYNNVVAQIVIWVNLNLWQKLKIGRDEAKPLQRLKGFPSFPLVERQANEVDWWDMVCNVKKLINEKKEDGKVFWQNLAGYKRQEALLPYLSSEEDRKKGKKFARYQFGDLLLHLEKKHGEDWGKVYDEAWERIDKKVEGLSKHIKLEEERRSEDAQSKAALTDWLRAKASFVIEGLKEADKDEFCRCELKLQKWYGDLRGKPFAIEAENSILDISGFSKQYNCAFIWQKDGVKKLNLYLIINYFKGGKLRFKKIKPEAFEANRFYTVINKKSGEIVPMEVNFNFDDPNLIILPLAFGKRQGREFIWNDLLSLETGSLKLANGRVIEKTLYNRRTRQDEPALFVALTFERREVLDSSNIKPMNLIGIDRGENIPAVIALTDPEGCPLSRFKDSLGNPTHILRIGESYKEKQRTIQAAKEVEQRRAGGYSRKYASKAKNLADDMVRNTARDWLYYAVTQDAMLIFENLSRGFGRQGKRTFMAERQYTRMEDWLTAKLAYEGLPSKTYLSKTLAQYTSKTCSNCGFTITSADYDRVLEKLKKTATGWMTTINGKELKVEGQITYYNRYKRQNVVKDLSVELDRLSEESVNNDISSWTKGRSGEALSLLKKRFSHRPVQEKFVCLNCGFETHADEQAALNIARSWLFLRSQEYKKYQTNKTTGNTDKRAFVETWQSFYRKKLKEVWKPAV

SEQ ID NO: 830 - protein, 978 aa, synthetic construct
  REGION 1..978: note = CasX protein variant
MQEIKRINKIRRRLVKDSNTKKAGKTGPMKTLLVRVMTPDLRERLENLRKKPENIPQPISNTSRANLNKLLTDYTEMKKAILHVYWEEFQKDPVGLMSRVAQPAPKNIDQRKLIPVKDGNERLTSSGFACSQCCQPLYVYKLEQVNDKGKPHTNYFGRCNVSEHERLILLSPHKPEANDELVTYSLGKFGQRALDFYSIHVTRESNHPVKPLEQIGGNSCASGPVGKALSDACMGAVASFLTKYQDIILEHQKVIKKNEKRLANLKDIASANGLAFPKITLPPQPHTKEGIEAYNNVVAQIVIWVNLNLWQKLKIGRDEAKPLQRLKGFPSFPLVERQANEVDWWDMVCNVKKLINEKKEDGKVFWQNLAGYKRQEALLPYLSSEEDRKKGKKFARYQFGDLLLHLEKKHGEDWGKVYDEAWERIDKKVEGLSKHIKLEEERRSEDAQSKAALTDWLRAKASFVIEGLKEADKDEFCRCELKLQKWYGDLRGKPFAIEAENSILDISGFSKQYNCAFIWQKDGVKKLNLYLIINYFKGGKLRFKKIKPEAFEANRFYTVINKKSGEIVPMEVNFNFDDPNLIILPLAFGKRQGREFIWNDLLSLETGSLKLANGRVIEKTLYNRRTRQDEPALFVALTFERREVLDSSNIKPMNLIGVDRGENIPAVIALTDPEGCPLSRFKDSLGNPTHILRIGESYKEKQRTIQAAKEVEQRRAGGYSRKYASKAKNLADDMVRNTARDLLYYAVTQDAMLIFENLSRGFGRQGKRTFMAERQYTRMEDWLTAKLAYEGLPSKTYLSKTLAQYTSKTCSNCGFTITSADYDRVLEKLKKTATGWMTTINGKELKVEGQITYYNRYKRQNVVKDLSVELDRLSEESVNNDISSWTKGRSGEALSLLKKRFSHRPVQEKFVCLNCGFETHADEQAALNIARSWLFLRSQEYKKYQTNKTTGNTDKRAFVETWQSFYRKKLKEVWKPAV

SEQ ID NO: 831 - protein, 977 aa, synthetic construct
  REGION 1..977: note = CasX protein variant
MQEIKRINKIRRRLVKDSNTKKAGKTGPMKTLLVRVMTPDLRERLENLRKKPENIPQPISNTSRANLNKLLTDYTEMKKAILHVYWEEFQKDPVGLMSRVAQPAPKNIDQRKLIPVKDGNERLTSSGFACSQCCQPLYVYKLEQVNDKGKPHTNYFGRCNVSEHERLILLSPHKPEANDELVTYSLGKFGQRALDFYSIHVTRESNHPVKPLEQIGGNSCASGPVGKALSDACMGAVASFLTKYQDIILEHQKVIKKNEKRLANLKDIASANGLAFPKITLPPQPHTKEGIEAYNNVVAQIVIWVNLNLWQKLKIGRDEAKPLQRLKGFPSFPLVERQANEVDWWDMVCNVKKLINEKKEDGKVFWQNLAGYKRQEALLPYLSSEEDRKKGKKFARYQFGDLLLHLEKKHGEDWGKVYDEAWERIDKKVEGLSKHIKLEEERRSEDAQSKAALTDWLRAKASFVIEGLKEADKDEFKRCELKLQKWYGDLRGKPFAIEAENSILDISGFSKQYNCAFIWQKDGVKKLNLYLIINYFKGGKLRFKKIKPEAFEANRFYTVINKKSGEIVPMEVNFNFDDPNLIILPLAFGKRQGREFIWNDLLSLETGSLKLANGRVIEKTLYNRRTRQDEPALFVALTFERREVLDSSNIKPMNLIGIDRGENIPAVIALTDPEGCPLSRFKDSLGNPTHILRIGESYKEKQRTIQAKKEVEQRRAGGYSRKYASKAKNLADDMVRNTVRDLLYYAVTQDAMLIFENLSRGFGRQGKRTFMAERQYTRMEDWLTAKLAYEGLSKTYLSKTLAQYTSKTCSNCGFTITSADYDRVLEKLKKTATGWMTTINGKELKVEGQITYYNRYKRQNVVKDLSVELDRLSEESVNNDISSWTKGRSGEALSLLKKRFSHRPVQEKFVCLNCGFETHADEQAALNIARSWLFLRSQEYKKYQTNKTTGNTDKRAFVETWQSFYRKKLKEVWKPAV

SEQ ID NO: 832 - protein, 978 aa, synthetic construct
  REGION 1..978: note = CasX protein variant
MQEIKRINKIRRRLVKDSNTKKAGKTGPMKTLLVRVMTPDLRERLENLRKKPENIPQPISNTSRANLNKLLTDYTEMKKAILHVYWEEFQKDPVGLMSRVAQPAPKNIDQRKLIPVKDGNERLTSSGFACSQCCQPLYVYKLEQVNDKGKPHTNYFGRCNVSEHERLILLSPHKPEANDELVTYSLGKFGQRALDFYSIHVTRESNHPVKPLEQIGGNSCASGPVGKALSDACMGAVASFLTKYQDIILEHQKVIKKNEKRLANLKDIASANGLAFPKITLPPQPHTKEGIEAYNNVVAQIVIWVNLNLWQKLKIGRDEAKPLQRLKGFPSFPLVERQANEVDWWDMVCNVKKLINEKKEDGKVFWQNLAGYKRQEALLPYLSSEEDRKKGKKFARYQFGDLLLHLEKKHGEDWGKVYDEAWERIDKKVEGLSKHIKLEEERRSEDAQSKAALTDWLRAKASFVIEGLKEADKDEFCRCELKLQKWYGDLRGKPFAIEAENSILDISGFSKQYNCAFIWQKDGVKKLNLYLIINYFKGGKLRFKKIKPEAFEANRFYTVINKKSGEIVPMEVNFNFDDPNLIILPLAFGKRQGREFIWNDLLSLETGSLKLANGRVIEKTLYNRRTRQDEPALFVALTFERREVLDSSNIKPMNLIGIDRGENIPAVIALTDPEGCPLSRFKDSLGNPTHILRIGESYKEKQRTIQAAKEVEQRRAGGYSRKYASKAKNLADDMVRNTARDLLYYAVTQDAMLIFENLSRGFGRQGKRTFMAERQYTRMEDWLTAKLAYEGLPSKTYLSKTLAQYTSKTCSNCGFTITSADYDRVLEKLKKTATGWMTTINGKELKVEGQITYYNRYKRQNVVKDLSVELDRLSEESVNNDISSWTKGRSGEALSLLKKRFSHRPVQEKFVCLNCGFETHADEQAALNIARMWLFLRSQEYKKYQTNKTTGNTDKRAFVETWQSFYRKKLKEVWKPAV

SEQ ID NO: 833 - protein, 978 aa, synthetic construct
  REGION 1..978: note = CasX protein variant
MQEIKRINKIRRRLVKDSNTKKAGKTGPMKTLLVRVMTPDLRERLENLRKKPENIPQPISNTSRANLNKLLTDYTEMKKAILHVYWEEFQKDPVGLMSRVAQPAPKNIDQRKLIPVKDGNERLTSSGFACSQCCQPLYVYKLEQVNDKGKPHTNYFGRCNVSEHERLILLSPHKPEANDELVTYSLGKFGQRALDFYSIHVTRESNHPVKPLEQIGGNSCASGPVGKALSDACMGAVASFLTKYQDIILEHQKVIKKNEKRLANLKDIASANGLAFPKITLPPQPHTKEGIEAYNNVVAQIVIWVNLNLWQKLKIGRDEAKPLQRLKGFPSFPLVERQANEVDWWDMVCNVKKLINEKKEDGKVFWQNLAGYKRQEALLPYLSSEEDRKKGKKFARYQFGDLLLHLEKKHGEDWGKVYDEAWERIDKKVEGLSKHIKLEEERRSEDAQSKAALTDWLRAKASFVIEGLKEADKDEFCRCELKLQKWYGDLRGKPFAIEAENSILDISGFSKQYNCAFIWQKDGVKKLNLYLIINYFKGGKLRFKKIKPEAFEANRFYTVINKKSGEIVPMEVNFNFDDPNLIILPLAFGKRQGREFIWNDLLSLETGSLKLANGRVIEKPLYNRRTRQDEPALFVALTFERREVLDSSNIKPMNLIGIDRGENIPAVIALTDPEGCPLSRFKDSLGNPTHILRIGESYKEKQRTIQAAKEVEQRRAGGYSRKYASKAKNLADDMVRNTARDLLYYAVTQDAMLIFENLSRGFGRQGKRTFMAERQYTRMEDWLTAKLAYEGLPSKTYLSKTLAQYTSKTCSNCGFTITSADYDRVLEKLKKTATGWMTTINGKELKVEGQITYYNRYKRQNVVKDLSVELDRLSEESVNNDISSWTKGRSGEALSLLKKRFSHRPVQEKFVCLNCGFETHADEQAALNIARSWLFLRSQEYKKYQTNKTTGNTDKRAFVETWQSFYRKKLKEVWKPAV

SEQ ID NO: 834 - protein, 978 aa, synthetic construct
  REGION 1..978: note = CasX protein variant
MQEIKRINKIRRRLVKDSNTKKAGKTGPMKTLLVRVMTPDLRERLENLRKKPENIPQPISNTSRANLNKLLTDYTEMKKAILHVYWEEFQKDPVGLMSRVAQPAPKNIDQRKLIPVKDGNERLTSSGFACSQCCQPLYVYKLEQVNDKGKPHTNYFGRCNVSEHERLILLSPHKPEANDELVTYSLGKFGQRALDFYSIHVTRESNHPVKPLEQIGGNSCASGPVGKALSDACMGAVASFLTKYQDIILEHQKVIKKNEKRLANLKDIASANGLAFPKITLPPQPHTKEGIEAYNNVVAQIVIWVNLNLWQKLKIGRDEAKPLQRLKGFPSFPLVERQANEVDWWDMVCNVKKLINEKKEDGKVFWQNLAGYKRQEALLPYLSSPEDRKKGKKFARYQFGDLLLHLEKKHGEDWGKVYDEAWERIDKKVEGLSKHIKLEEERRSEDAQSKAALTDWLRAKASFVIEGLKEADKDEFCRCELKLQKWYGDLRGKPFAIEAENSILDISGFSKQYNCAFIWQKDGVKKLNLYLIINYFKGGKLRFKKIKPEAFEANRFYTVINKKSGEIVPMEVNFNFDDPNLIILPLAFGKRQGREFIWNDLLSLETGSLKLANGRVIEKTLYNRRTRQDEPALFVALTFERREVLDSSNIKPMNLIGIDRGENIPAVIALTDPEGCPLSRFKDSLGNPTHILRIGESYKEKQRTIQAAKEVEQRRAGGYSRKYASKAKNLADDMVRNTARDLLYYAVTQDAMLIFENLSRGFGRQGKRTFMAERQYTRMEDWLTAKLAYEGLPSKTYLSKTLAQYTSKTCSNCGFTITSADYDRVLEKLKKTATGWMTTINGKELKVEGQITYYNRYKRQNVVKDLSVELDRLSEESVNNDISSWTKGRSGEALSLLKKRFSHRPVQEKFVCLNCGFETHADEQAALNIARSWLFLRSQEYKKYQTNKTTGNTDKRAFVETWQSFYRKKLKEVWKPAV

SEQ ID NO: 835 - protein, 978 aa, synthetic construct
  REGION 1..978: note = CasX protein variant
MQEIKRINKIRRRLVKDSNTKKAGKTGPMKTLLVRVMTPDLRERLENLRKKPENIPQPISNTSRANLNKLLTDYTEMKKAILHVYWEEFQKDPVGLMSRVAQPAPKNIDQRKLIPVKDGNERLTSSGFACSQCCQPLYVYKLEQVNDKGKPHTNYFGRCNVSEHERLILLSPHKPEANDELVTYSLGKFGQRALDFYSIHVTRESNHPVKPLEQIGGNSCASGPVGKALSDACMGAVASFLTKYQDIILEHQKVIKKNEKRLANLKDIASANGLAFPKITLPPQPHTKEGIEAYNNVVAQIVIWVNLNLWQKLKIGRDEAKPLQRLKGFPSFPLVERQANEVDWWDMVCNVKKLINEKKEDGKVFWQNLAGYKRQEALLPYLSSEEDRKKGKKFARYQFGDLLLHLEKKHGEDWGKVYDEAWERIDKKVEGLSKHIKLEEERRSEDAQSKAALTDWLRAKASFVIEGLKEADKDEFCRCELKLQKWYGDLRGKPFAIEAENSILDISGFSKQYNCAFIWQKDGVKKLNLYLIINYFKGGKLRFKKIKPEAFEANRFYTVINKKSGEIVPMEVNFNFDDPNLIILPLAFGKRQGREFIWNDLLSLETGSLKLANGRVIEKTLYNRRTRQDEPALFVALTFERREVLDSSNIKPMNLIGIDRGENIPAVIALTDPEGCPLSRFKDSLGNPTHILRIGESYKEKQRTIQAQKEVEQRRAGGYSRKYASKAKNLADDMVRNTARDLLYYAVTQDAMLIFENLSRGFGRQGKRTFMAERQYTRMEDWLTAKLAYEGLPSKTYLSKTLAQYTSKTCSNCGFTITSADYDRVLEKLKKTATGWMTTINGKELKVEGQITYYNRYKRQNVVKDLSVELDRLSEESVNNDISSWTKGRSGEALSLLKKRFSHRPVQEKFVCLNCGFETHADEQAALNIARSWLFLRSQEYKKYQTNKTTGNTDKRAFVETWQSFYRKKLKEVWKPAV

SEQ ID NO: 836 - protein, 978 aa, synthetic construct
  REGION 1..978: note = CasX protein variant
MQEIKRINKIRRRLVKDSNTKKAGKTGPMKTLLVRVMTPDLRERLENLRKKPENIPQPISNTSRANLNKLLTDYTEMKKAILHVYWEEFQKDPVGLMSRVAQPAPKNIDQRKLIPVKDGNERLTSSGFACSQCCQPLYVYKLEQVNDKGKPHTNYFGRCNVSEHERLILLSPHKPEANDELVTYSLGKFGQRALDFYSIHVTRESNHPVKPLEQIGGNSCASGPVGKALSDACMGAVASFLTKYQDIILEHQKVIKKNEKRLANLKDIASANGLAFPKITLPPQPHTKEGIEAYNNVVAQIVIWVNKNLWQKLKIGRDEAKPLQRLKGFPSFPLVERQANEVDWWDMVCNVKKLINEKKEDGKVFWQNLAGYKRQEALLPYLSSEEDRKKGKKFARYQFGDLLLHLEKKHGEDWGKVYDEAWERIDKKVEGLSKHIKLEEERRSEDAQSKAALTDWLRAKASFVIEGLKEADKDEFCRCELKLQKWYGDLRGKPFAIEAENSILDISGFSKQYNCAFIWQKDGVKKLNLYLIINYFKGGKLRFKKIKPEAFEANRFYTVINKKSGEIVPMEVNFNFDDPNLIILPLAFGKRQGREFIWNDLLSLETGSLKLANGRVIEKTLYNRRTRQDEPALFVALTFERREVLDSSNIKPMNLIGIDRGENIPAVIALTDPEGCPLSRFKDSLGNPTHILRIGESYKEKQRTIQAAKEVEQRRAGGYSRKYASKAKNLADDMVRNTARDLLYYAVTQDAMLIFENLSRGFGRQGKRTFMAERQYTRMEDWLTAKLAYEGLPSKTYLSKTLAQYTSKTCSNCGFTITSADYDRVLEKLKKTATGWMTTINGKELKVEGQITYYNRYKRQNVVKDLSVELDRLSEESVNNDISSWTKGRSGEALSLLKKRFSHRPVQEKFVCLNCGFETHADEQAALNIARSWLFLRSQEYKKYQTNKTTGNTDKRAFVETWQSFYRKKLKEVWKPAV

SEQ ID NO: 837 - protein, 977 aa, synthetic construct
  REGION 1..977: note = CasX protein variant
MQEIKRINKIRRRLVKDSNTKKAGKTGPMKTLLVRVMTPDLRERLENLRKKPENIPQPISNTSRANLNKLLTDYTEMKKAILHVYWEEFQKDPVGLMSRVAQPAPKNIDQRKLIPVKDGNERLTSSGFACSQCCQPLYVYKLEQVNDKGKPHTNYFGRCNVSEHERLILLSPHKPEANDELVTYSLGKFGQRALDFYSIHVTRESNHPVKPLEQIGGNSCASGPVGKALSDACMGAVASFLTKYQDIILEHQKVIKKNEKRLANLKDIASANGLAFPKITLPPQPHTKEGIEAYNNVVAQIVIWVNLNLWQKLKIGRDEAKPLQRLKGFPSFPLVERQANEVDWWDMVCNVKKLINEKKEDGKVFWQNLAGYKRQEALRPYLSSEEDRKKGKKFARYQFGDLLLHLEKKHGEDWGKVYDEAWERIDKKVEGLSKHIKLEEERRSEDAQSKAALTDWLRAKASFVIEGLKEADKDEFCRCELKLQKWYGSLRGKPFAIEAENSILDISGFSKQYNCAFIWQKDGVKKLNLYLIINYFKGGKLRFKKIKPEAFEANRFYTVINKKSGEIVPMEVNFNFDDPNLIILPLAFGKRQGREFIWNDLLSLETGSLKLANGRVIEKTLYNRRTRQDEPALFVALTFERREVLDSSNIKPMNLIGIDRGENIPAVIALTDPEGCPLSRFKDSLGNPTHILRIGESYKEKQRTIQAKKEVEQRRAGGYSRKYASKAKNLADDMVRNTARDLLYYAVTQDAMLIFENLSRGFGRQGKRTFMAERQYTRMEDWLTAKLAYEGLSKTYLSKTLAQYTSKTCSNCGFTITSADYDRVLEKLKKTATGWMTTINGKELKVEGQITYYNRYKRQNVVKDLSVELDRLSEESVNNDISSWTKGRSGEALSLLKKRFSHRPVQEKFVCLNCGFETHADEQAALNIARSWLFLRSQEYKKYQTNKTTGNTDKRAFVETWQSFYRKKLKEVWKPAV

SEQ ID NO: 838 - protein, 978 aa, synthetic construct
  REGION 1..978: note = CasX protein variant
MQEIKRINKIRRRLVKDSNTKKAGKTGPMKTLLVRVMTPDLRERLENLRKKPENIPQPISNTSRANLNKLLTDYTEMKKAILHVYWEEFQKDPVGLMSRVAQPAPKNIDQRKLIPVKDGNERLTSSGFACSQCCQPLYVYKLEQVNDKGKPHTNYFGRCNVSEHERLILLSPHKPEANDELVTYSLGKFGQRALDFYSIHVTRESNHPVKPLEQIGGNSCASGPVGKALSDACMGAVASFLTKYQDIILEHQKVIKKNEKRLANLKDIASANGLAFPKITLPPQPHTKEGIEAYNNVVAQIVIWVNLNLWQKLKIGRDEAKPLQRLKGFPSFPLVERQANEVDWWDMVCNVKKLINEKKEDGKVFWQNLAGYKRQEALLPYLSSEEDRKKGKKFARYQFGDLLLHLEKKHGEDWGKVYDEAWERIDKKVEGLSKHIKLEEERRSEDAQSKAALTDWLRAKASFVIEGLKEADKDEFQRCELKLQKWYGDLRGKPFAIEAENSILDISGFSKQYNCAFIWQKDGVKKLNLYLIINYFKGGKLRFKKIKPEAFEANRFYTVINKKSGEIVPMEVNFNFDDPNLIILPLAFGKRQGREFIWNDLLSLETGSLKLANGRVIEKTLYNRRTRQDEPALFVALTFERREVLDSSNIKPMNLIGIDRGENIPAVIALTDPEGCPLSRFKDSLGNPTHILRIGESYKEKQRTIQAAKEVEQRRAGGYSRKYASKAKNLADDMVRNTARDLLYYAVTQDAMLIFENLSRGFGRQGKRTFMAERQYTRMEDWLTAKLAYEGLPSKTYLSKTLAQYTSKTCSNCGFTITSADYDRVLEKLKKTATGWMTTINGKELKVEGQITYYNRYKRQNVVKDLSVELDRLSEESVNNDISSWTKGRSGEALSLLKKRFSHRPVQEKFVCLNCGFETHADEQAALNIARSWLFLRSQEYKKYQTNKTTGNTDKRAFVETWQSFYRKKLKEVWKPAV

SEQ ID NO: 839 - protein, 978 aa, synthetic construct
  REGION 1..978: note = CasX protein variant
MQEIKRINKIRRRLVKDSNTKKAGKTGPMKTLLVRVMTPDLRERLENLRKKPENIPQPISNTSRANLNKLLTDYTEMKKAILHVYWEEFQKDPVGLMSRVAQPAPKNIDQRKLIPVKDGNERLTSSGFACSQCCQPLYVYKLEQVNDKGKPHTNYFGRCNVSEHERLILLSPHKPEANDELVTYSLGKFGQRALDFYSIHVTRESNHPVKPLEQIGGNSCASGPVGKALSDACMGAVASFLTKYQDIILEHQKVIKKNEKRLANLKDIASANGLAFPKITLPPQPHTKEGIEAYNNVVAQIVIWVNLNLWQKLKIGRDEAKPLQRLKGFPSFPLVERQANEVDWWDMVCNVKKLINEKKEDGKVFWQNLAGYKRQEALLPYLSSEEDRKKGKKFARYQFGDLLLHLEKKHGEDWGKVYDEAWERIDKKVEGLSKHIKLEEERRSEDAQSKAALTDWLRAKASFVIEGLKEADKDEFCRCELKLQKWYGDLRGKPFAIEAENSILDISGFSKQYNCAFIWQKDGVKKLNLYLIINYFKGGKLRFKKIKPEAFEANRFYTVINKKSGEIVPMEVNFNFDDPNLIILPLAFGKRQGREFIWNDLLSLETGSLKLANGRVIEKTLYNRRTRQDEPALFVALTFERREVLDSSNIKPMNLIGIDRGENIPAVIALTDPEGCPLSRFKDSLGNPTHILRIGESYKEKQRTIQAAKEVEQRRAGGYSRKYASKAKNLADDMVRNTARDLLYYAVTQDAMLIFENLSRGFGRQGKRTFMAERQYTRMEDWLTAKLAYEGLPSKTYLSKTLAAYTSKTCSNCGFTITSADYDRVLEKLKKTATGWMTTINGKELKVEGQITYYNRYKRQNVVKDLSVELDRLSEESVNNDISSWTKGRSGEALSLLKKRFSHRPVQEKFVCLNCGFETHADEQAALNIARSWLFLRSQEYKKYQTNKTTGNTDKRAFVETWQSFYRKKLKEVWKPAV

SEQ ID NO: 840 - protein, 978 aa, synthetic construct
  REGION 1..978: note = CasX protein variant
MQEIKRINKIRRRLVKDSNTKKAGKTGPMKTLLVRVMTPDLRERLENLRKKPENIPQPISNTSRANLNKLLTDYTEMKKAILHVYWEEFQKDPVGLMSRVAQPAPKNIDQRKLIPVKDGNERLTSSGFACSQCCQPLYVYKLEQVNDKGKPHTNYFGRCNVSEHERLILLSPHKPEANDELVTYSLGKFGQRALDFYSIHVTRESNHPVKPLEQIGGNSCASGPVGKALSDACMGAVASFLTKYQDIILEHQKVIKKNEKRLANLKDIASANGLAFPKITLPPQPHTKEGIEAYNNVVAQIVIWVNLNLWQKLKIGRDEAKPLQRLKGFPSFPLVERQANEVDWWDMVCNVKKLINEKKEDGKVFWQNLAGYKRQEALLPYLSSEEDRKKGKKFARYQLGDLLLHLEKKHGEDWGKVYDEAWERIDKKVEGLSKHIKLEEERRSEDAQSKAALTDWLRAKASFVIEGLKEADKDEFCRCELKLQKWYGDLRGKPFAIEAENSILDISGFSKQYNCAFIWQKDGVKKLNLYLIINYFKGGKLRFKKIKPEAFEANRFYTVINKKSGEIVPMEVNFNFDDPNLIILPLAFGKRQGREFIWNDLLSLETGSLKLANGRVIEKTLYNRRTRQDEPALFVALTFERREVLDSSNIKPMNLIGIDRGENIPAVIALTDPEGCPLSRFKDSLGNPTHILRIGESYKEKQRTIQAAKEVEQRRAGGYSRKYASKAKNLADDMVRNTARDLLYYAVTQDAMLIFENLSRGFGRQGKRTFMAERQYTRMEDWLTAKLAYEGLPSKTYLSKTLAQYTSKTCSNCGFTITSADYDRVLEKLKKTATGWMTTINGKELKVEGQITYYNRYKRQNVVKDLSVELDRLSEESVNNDISSWTKGRSGEALSLLKKRFSHRPVQEKFVCLNCGFETHADEQAALNIARSWLFLRSQEYKKYQTNKTTGNTDKRAFVETWQSFYRKKLKEVWKPAV

SEQ ID NO: 841 - protein, 977 aa, synthetic construct
  REGION 1..977: note = CasX protein variant
MQEIKRINKIRRRLVKDSNTKKAGKTGPMKTLLVRVMTPDLRERLENLRKKPENIPQPISNTSRANLNKLLTDYTEMKKAILHVYWEEFQKDPVGLMSRVAQPAPKNIDQRKLIPVKDGNERLTSSGFACSQCCQPLYVYKLEQVNDKGKPHTNYFGRCNVSEHERLILLSPHKPEANDELVTYSLGKFGQRALDFYSIHVTRESNHPVKPLEQIGGNSCASGPVGKALSDACMGAVASFLTKYQDIILEHQKVIKKNEKRLANLKDIASANGLAFPKITLPPQPHTKEGIEAYNNVVAQIVIWVNLNLWQKLKIGRDEAKPLQRLKGFPSFPLVERQANEVDWWDMVCNVKKLINEKKEDGKVFWQNLAGYKRQEALRPYLSSEEDRKKGKKFARYQFGDLLLHLEKKHGEDWGKVYDEAWERIDKKVEGLSKHIKLEEERRSEDAQSKAALTDWLRAKASFVIEGLKEADKDEFCRCELKLQKWYGDLRGKPFAIEAENSILDISGFSKQYNCAFIWQKDGVKKLNLYLIINYFKGGKLRFKKIKPEAFEANRFYTVINKKSGEIVPMEVNFNFDDPNLIILPLAFGKRQGREFIWNDLLSLETGSLKLANGRVIEKTLYNRRTRQDEPALFVALTFERREVLDSSNIKPMNLIGIDRGENIPAVIALTDPEGCPLSRFKDSLGNPTHILRIGESYKEKQRTIQAKKEVEQRRAGGYSRKYASKAKNLADDMVRNTARDLLYYAVTQDAMLIFENLSRGFGRQGKRTFMAERQYTRMEDWLTAKLAYEGLSKTLLSKTLAQYTSKTCSNCGFTITSADYDRVLEKLKKTATGWMTTINGKELKVEGQITYYNRYKRQNVVKDLSVELDRLSEESVNNDISSWTKGRSGEALSLLKKRFSHRPVQEKFVCLNCGFETHADEQAALNIARSWLFLRSQEYKKYQTNKTTGNTDKRAFVETWQSFYRKKLKEVWKPAV

SEQ ID NO: 842 - protein, 977 aa, synthetic construct
  REGION 1..977: note = CasX protein variant
MQEIKRINKIRRRLVKDSNTKKAGKTGPMKTLLVRVMTPDLRERLENLRKKPENIPQPISNTSRANLNKLLTDYTEMKKAILHVYWEEFQKDPVGLMSRVAQPAPKNIDQRKLIPVKDGNERLTSSGFACSQCCQPLYVYKLEQVNDKGKPHTNYFGRCNVSEHERLILLSPHKPEANDELVTYSLGKFGQRALDFYSIHVTRESNHPVKPLEQIGGNSCASGPVGKALSDACMGAVASFLTKYQDIILEHQKVIKKNEKRLANLKDIASANGLAFPKITLPPQPHTKEGIEAYNNVVAQIVIWVNLNLWQKLKIGRDEAKPLQRLKGFPSFPLVERQANEVDWWDMVCNVKKLINEKKEDGKVFWQNLAGYKRQEALRPYLSSEEDRKKGKKFARYQFGDLLLHLEKKHGEDWGKVYDEAWERIDKKVEGLSKHIKLEEERRSEDAQSKAALTDWLRAKASFVIEGLKEADKDEFKRCELKLQKWYGDLRGKPFAIEAENSILDISGFSKQYNCAFIWQKDGVKKLNLYLIINYFKGGKLRFKKIKPEAFEANRFYTVINKKSGEIVPMEVNFNFDDPNLIILPLAFGKRQGREFIWNDLLSLETGSLKLANGRVIEKTLYNRRTRQDEPALFVALTFERREVLDSSNIKPMNLIGIDRGENIPAVIALTDPEGCPLSRFKDSLGNPTHILRIGESYKEKQRTIQAKKEVEQRRAGGYSRKYASKAKNLADDMVRNTARDLLYYAVTQDAMLIFENLSRGFGRQGKRTFMAERQYTRMEDWLTAKLAYEMLSKTYLSKTLAQYTSKTCSNCGFTITSADYDRVLEKLKKTATGWMTTINGKELKVEGQITYYNRYKRQNVVKDLSVELDRLSEESVNNDISSWTKGRSGEALSLLKKRFSHRPVQEKFVCLNCGFETHADEQAALNIARSWLFLRSQEYKKYQTNKTTGNTDKRAFVETWQSFYRKKLKEVWKPAV

SEQ ID NO: 843 - protein, 978 aa, synthetic construct
  REGION 1..978: note = CasX protein variant
MQEIKRINKIRRRLVKDSNTKKAGKTGPMKTLLVRVMTPDLRERLENLRKKPENIPQPISNTSRANLNKLLTDYTEMKKAILHVYWEEFQKDPVGLMSRVAQPAPKNIDQRKLIPVKDGNERLTSSGFACSQCCQPLYVYKLEQVNDKGKPHTNYFGRCNVSEHERLILLSPHKPEANDELVTYSLGKFGQRALDFYSIHVTRESNHPVKPLEQIGGNSCASGPVGKALSDACMGAVASFLTKYQDIILEHQKVIKKNEKRLANLKDIASANGLAFPKITLPPQPHTKEGIEAYNNVVAQIVIWVNLNLWQKLKIGRDEAKPLQRLKGFPSFPLVERQANEVDWWDMVCNVKKLINEKKEDGKVFWQNLAGYKRQEALLPYLSSEEDRKKGKKFARYQFGDLLLHLEKKHGEDWGKVYDEAWERIDKKVEGLSKHIKLEEERRSEDAQSKAALTDWLRAKASFVIEGLKEADKDEFCRCELKLQKWYGDLRGKPFAIEAENSILDISGFSKQYNCAFIWQKDGVKKLNLYLIINYFKGGKLRFKKIKPEAFEANRFYTVINKKSGEIVPMEVNFNFDDPNLIILPLAFGKRQGREFIWNDLLSLETGSLKLANGRVIEKTLYNRRTRQDEPALFVALTFERREVLDSSNIKPMNLIGIDRGENIPAVIALTDPEGCPLSRFKDSLGNPTHILRIGESYKEKQRTIQAAKEVEQRRAGGYSRKYASKAKNLADTMVRNTARDLLYYAVTQDAMLIFENLSRGFGRQGKRTFMAERQYTRMEDWLTAKLAYEGLPSKTYLSKTLAQYTSKTCSNCGFTITSADYDRVLEKLKKTATGWMTTINGKELKVEGQITYYNRYKRQNVVKDLSVELDRLSEESVNNDISSWTKGRSGEALSLLKKRFSHRPVQEKFVCLNCGFETHADEQAALNIARSWLFLRSQEYKKYQTNKTTGNTDKRAFVETWQSFYRKKLKEVWKPAV

SEQ ID NO: 844 - protein, 978 aa, synthetic construct
  REGION 1..978: note = CasX protein variant
MQEIKRINKIRRRLVKDSNTKKAGKTGPMKTLLVRVMTPDLRERLENLRKKPENIPQPISNTSRANLNKLLTDYTEMKKAILHVYWEEFQKDPVGLMSRVAQPAPKNIDQRKLIPVKDGNERLTSSGFACSQCCQPLYVYKLEQVNDKGKPHTNYFGRCNVSEHERLILLSPHKPEANDELVTYSLGKFGQRALDFYSIHVTRESNHPVKPLEQIGGNSCASGPVGKALSDACMGAVASFLTKYQDIILEHQKVIKKNEKRLANLKDIASANGLAFPKITLPPQPHTKEGIEAYNNVVAQIVIWVNLNLWQKLKIGRDEAKPLQRLKGFPSFPLVERQANEVDWWDMVCNVKKLINEKKEDGKVFWQNLAGYKRQEALLPYLSSEEDRKKGKKFARYQFGDLLLHLEKKHGEDWGKVYDEAWERIDKKVEGLSKHIKLEEERRSEDAQSKAALTDWLRAKASFVIEGLKEADKDEFCRCELKLQKWYGDLRGKPFAIEAENSILDISGFSKQYNCAFIWQKDGVKKLNLYLIINYFKGGKLRFKKIKPEAFEANRFYTVINKKSGEIVPMEVNFNFDDPNLIILPLAFGKRQGREFIWNDLLSLETGSLKLANGRVIEKTLYNRRTRQDEPALFVALTFERREVLDSSNIKPMNLIGIDRGENIPAVIALTDPEGCPLSRFKDSLGNPTHILRIGESYKEKQRTIQAAKEVEQRRAGGYSRKYASKAKNLADDMVRNTARDLLYYAVTQDAMLIFENLSRGFGRQGKRTFMAERQYTRMEDWLTAKLAYEGLQSKTYLSKTLAQYTSKTCSNCGFTITSADYDRVLEKLKKTATGWMTTINGKELKVEGQITYYNRYKRQNVVKDLSVELDRLSEESVNNDISSWTKGRSGEALSLLKKRFSHRPVQEKFVCLNCGFETHADEQAALNIARSWLFLRSQEYKKYQTNKTTGNTDKRAFVETWQSFYRKKLKEVWKPAV

SEQ ID NO: 845 - protein, 978 aa, synthetic construct
  REGION 1..978: note = CasX protein variant
MQEIKRINKIRRRLVKDSNTKKAGKTGPMKTLLVRVMTPDLRERLENLRKKPENIPQPISNTSRANLNKLLTDYTEMKKAILHVYWEEFQKDPVGLMSRVAQPAPKNIDQRKLIPVKDGNERLTSSGFACSQCCQPLYVYKLEQVNDKGKPHTNYFGRCNVSEHERLILLSPHKPEANDELVTYSLGKFGQRALDFYSIHVTRESNHPVKPLEQIGGNSCASGPVGKALSDACMGAVASFLTKYQDIILEHQKVIKKNEKRLANLKDIASANGLAFPKITLPPQPHTKEGIEAYNNVVAQIVIWVNLNLWQKLKIGRDEAKPLQRLKGFPSFPLVERQANEVDWWDMVCNVKKLINEKKEDGKVFWQNLAGYKRQEALLPYLSSEEDRKKGKKFARYQFGDLLLHLEKKHGEDWGKVYDEAWERIDKKVEGLSKHIKLEEERRSEDAQSKAALTDWLRAKASFVIEGLKEADKDEFCRCELKLQKWYGDLRGKPFAIEAENSILDISGFSKQYNCAFIWQKDGVKKLNLYLIINYFKGGKLRFKKIKPEAFEANRFYTVINKKSGEIVPMEVNFNFDDPNLIILPLAFGKRQGREFIWNDLLSLETGSLKLANGRVIEKTLYNRRTRQDEPALFVALTFERREVLDSSNIKPMNLIGIDRGENIPAVIALTDPEGCPLSRFKDSLGNPTHILRIGESYKEKQRTIQAAKEVEQRRAGGYSRKYASKAKNLADDMVRNTVRDLLYYAVTQDAMLIFENLSRGFGRQGKRTFMAERQYTRMEDWLTAKLAYEGLPSKTYLSKTLAQYTSKTCSNCGFTITSADYDRVLEKLKKTATGWMTTINGKELKVEGQITYYNRYKRQNVVKDLSVELDRLSEESVNNDISSWTKGRSGEALSLLKKRFSHRPVQEKFVCLNCGFETHADEQAALNIARSWLFLRSQEYKKYQTNKTTGNTDKRAFVETWQSFYRKKLKEVWKPAV

SEQ ID NO: 846 - protein, 978 aa, synthetic construct
  REGION 1..978: note = CasX protein variant
MQEIKRINKIRRRLVKDSNTKKAGKTGPMKTLLVRVMTPDLRERLENLRKKPENIPQPISNTSRANLNKLLTDYTEMKKAILHVYWEEFQKDPVGLMSRVAQPAPKNIDQRKLIPVKDGNERLTSSGFACSQCCQPLYVYKLEQVNDKGKPHTNYFGRCNVSEHERLILLSPHKPEANDELVTYSLGKFGQRALDFYSIHVTRESNHPVKPLEQIGGNSCASGPVGKALSDACMGAVASFLTKYQDIILEHQKVIKKNEKRLANLKDIASANGLAFPKITLPPQPHTKEGIEAYNNVVAQIVIWVNLNLWQKLKIGRDEAKPLQRLKGFPSFPLVERQANEVDWWDMVCNVKKLINEKKEDGKVFWQNLAGYKRQEALLPYLSSESDRKKGKKFARYQFGDLLLHLEKKHGEDWGKVYDEAWERIDKKVEGLSKHIKLEEERRSEDAQSKAALTDWLRAKASFVIEGLKEADKDEFCRCELKLQKWYGDLRGKPFAIEAENSILDISGFSKQYNCAFIWQKDGVKKLNLYLIINYFKGGKLRFKKIKPEAFEANRFYTVINKKSGEIVPMEVNFNFDDPNLIILPLAFGKRQGREFIWNDLLSLETGSLKLANGRVIEKTLYNRRTRQDEPALFVALTFERREVLDSSNIKPMNLIGIDRGENIPAVIALTDPEGCPLSRFKDSLGNPTHILRIGESYKEKQRTIQAAKEVEQRRAGGYSRKYASKAKNLADDMVRNTARDLLYYAVTQDAMLIFENLSRGFGRQGKRTFMAERQYTRMEDWLTAKLAYEGLPSKTYLSKTLAQYTSKTCSNCGFTITSADYDRVLEKLKKTATGWMTTINGKELKVEGQITYYNRYKRQNVVKDLSVELDRLSEESVNNDISSWTKGRSGEALSLLKKRFSHRPVQEKFVCLNCGFETHADEQAALNIARSWLFLRSQEYKKYQTNKTTGNTDKRAFVETWQSFYRKKLKEVWKPAV

SEQ ID NO: 847 - protein, 978 aa, synthetic construct
  REGION 1..978: note = CasX protein variant
MQEIKRINKIRRRLVKDSNTKKAGKTGPMKTLLVRVMTPDLRERLENLRKKPENIPQPISNTSRANLNKLLTDYTEMKKAILHVYWEEFQKDPVGLMSRVAQPAPKNIDQRKLIPVKDGNERLTSSGFACSQCCQPLYVYKLEQVNDKGKPHTNYFGRCNVSEHERLILLSPHKPEANDELVTYSLGKFGQRALDFYSIHVTRESNHPVKPLEQIGGNSCASGPVGKALSDACMGAVASFLTKYQDIILEHQKVIKKNEKRLANLKDIASANGLAFPKITLPPQPHTKEGIEAYNNVVAQIVIWVNLNLWQKLKIGRDEAKPLQRLKGFPSFPLVERQANEVDWWDMVCNVKKLINEKKEDGKVFWQNLAGYKRQEALLPYLSSEEDRKKGKKFARYQFGDLLLHLEKKHGEDWGKVYDEAWERIDKKVEGLSKHIKLEEERRSEDAQSKAALTDWLRAKASFVIEGLKEADKDEFCRCELKLQKWYGDLRGKPFAIEAENSILDISGFSKQYNCAFIWQKDGVKKLNLYLIINYSKGGKLRFKKIKPEAFEANRFYTVINKKSGEIVPMEVNFNFDDPNLIILPLAFGKRQGREFIWNDLLSLETGSLKLANGRVIEKTLYNRRTRQDEPALFVALTFERREVLDSSNIKPMNLIGIDRGENIPAVIALTDPEGCPLSRFKDSLGNPTHILRIGESYKEKQRTIQAAKEVEQRRAGGYSRKYASKAKNLADDMVRNTARDLLYYAVTQDAMLIFENLSRGFGRQGKRTFMAERQYTRMEDWLTAKLAYEGLPSKTYLSKTLAQYTSKTCSNCGFTITSADYDRVLEKLKKTATGWMTTINGKELKVEGQITYYNRYKRQNVVKDLSVELDRLSEESVNNDISSWTKGRSGEALSLLKKRFSHRPVQEKFVCLNCGFETHADEQAALNIARSWLFLRSQEYKKYQTNKTTGNTDKRAFVETWQSFYRKKLKEVWKPAV

SEQ ID NO: 848 - protein, 978 aa, synthetic construct
  REGION 1..978: note = CasX protein variant
MQEIKRINKIRRRLVKDSNTKKAGKTGPMKTLLVRVMTPDLRERLENLRKKPENIPQPISNTSRANLNKLLTDYTEMKKAILHVYWEEFQKDPVGLMSRVAQPAPKNIDQRKLIPVKDGNERLTSSGFACSQCCQPLYVYKLEQVNDKGKPHTNYFGRCNVSEHERLILLSPHKPEANDELVTYSLGKFGQRALDFYSIHVTRESNHPVKPLEQIGGNSCASGPVGKALSDACMGAVASFLTKYQDIILEHQKVIKKNEKRLANLKDIASANGLAFPKITLPPQPHTKEGIEAYNNVVAQIVIWVNLNLWQKLKIGRDEAKPLQRLKGFPSFPLVERQANEVDWWDMVCNVKKLINEKKEDGKVFWQNLAGYKRQEALLPYLSSEEKRKKGKKFARYQFGDLLLHLEKKHGEDWGKVYDEAWERIDKKVEGLSKHIKLEEERRSEDAQSKAALTDWLRAKASFVIEGLKEADKDEFCRCELKLQKWYGDLRGKPFAIEAENSILDISGFSKQYNCAFIWQKDGVKKLNLYLIINYFKGGKLRFKKIKPEAFEANRFYTVINKKSGEIVPMEVNFNFDDPNLIILPLAFGKRQGREFIWNDLLSLETGSLKLANGRVIEKTLYNRRTRQDEPALFVALTFERREVLDSSNIKPMNLIGIDRGENIPAVIALTDPEGCPLSRFKDSLGNPTHILRIGESYKEKQRTIQAAKEVEQRRAGGYSRKYASKAKNLADDMVRNTARDLLYYAVTQDAMLIFENLSRGFGRQGKRTFMAERQYTRMEDWLTAKLAYEGLPSKTYLSKTLAQYTSKTCSNCGFTITSADYDRVLEKLKKTATGWMTTINGKELKVEGQITYYNRYKRQNVVKDLSVELDRLSEESVNNDISSWTKGRSGEALSLLKKRFSHRPVQEKFVCLNCGFETHADEQAALNIARSWLFLRSQEYKKYQTNKTTGNTDKRAFVETWQSFYRKKLKEVWKPAV

SEQ ID NO: 849 - protein, 978 aa, synthetic construct
  REGION 1..978: note = CasX protein variant
MQEIKRINKIRRRLVKDSNTKKAGKTGPMKTLLVRVMTPDLRERLENLRKKPENIPQPISNTSRANLNKLLTDYTEMKKAILHVYWEEFQKDPVGLMSRVAQPAPKNIDQRKLIPVKDGNERLTSSGFACSQCCQPLYVYKLEQVNDKGKPHTNYFGRCNVSEHERLILLSPHKPEANDELVTYSLGKFGQRALDFYSIHVTRESNHPVKPLEQIGGNSCASGPVGKALSDACMGAVASFLTKYQDIILEHQKVIKKNEKRLANLKDIASANGLAFPKITLPPQPHTKEGIEAYNNVVAQIVIWVNLNLWQKLKIGRDEAKPLQRLKGFPSFPLVERQANEVDWWDMVCNVKKLINEKKEDGKVFWQNLAGYKRQEALLPYLSSENDRKKGKKFARYQFGDLLLHLEKKHGEDWGKVYDEAWERIDKKVEGLSKHIKLEEERRSEDAQSKAALTDWLRAKASFVIEGLKEADKDEFCRCELKLQKWYGDLRGKPFAIEAENSILDISGFSKQYNCAFIWQKDGVKKLNLYLIINYFKGGKLRFKKIKPEAFEANRFYTVINKKSGEIVPMEVNFNFDDPNLIILPLAFGKRQGREFIWNDLLSLETGSLKLANGRVIEKTLYNRRTRQDEPALFVALTFERREVLDSSNIKPMNLIGIDRGENIPAVIALTDPEGCPLSRFKDSLGNPTHILRIGESYKEKQRTIQAAKEVEQRRAGGYSRKYASKAKNLADDMVRNTARDLLYYAVTQDAMLIFENLSRGFGRQGKRTFMAERQYTRMEDWLTAKLAYEGLPSKTYLSKTLAQYTSKTCSNCGFTITSADYDRVLEKLKKTATGWMTTINGKELKVEGQITYYNRYKRQNVVKDLSVELDRLSEESVNNDISSWTKGRSGEALSLLKKRFSHRPVQEKFVCLNCGFETHADEQAALNIARSWLFLRSQEYKKYQTNKTTGNTDKRAFVETWQSFYRKKLKEVWKPAV

SEQ ID NO: 850 - protein, 978 aa, synthetic construct
  REGION 1..978: note = CasX protein variant
MQEIKRINKIRRRLVKDSNTKKAGKTGPMKTLLVRVMTPDLRERLENLRKKPENIPQPISNTSRANLNKLLTDYTEMKKAILHVYWEEFQKDPVGLMSRVAQPAPKNIDQRKLIPVKDGNERLTSSGFACSQCCQPLYVYKLEQVNDKGKPHTNYFGRCNVSEHERLILLSPHKPEANDELVTYSLGKFGQRALDFYSIHVTRESNHPVKPLEQIGGNSCASGPVGKALSDACMGAVASFLTKYQDIILEHQKVIKKNEKRLANLKDIASANGLAFPKITLPPQPHTKEGIEAYNNVVAQIVIWVNLNLWQKLKIGRDEAKPLQRLKGFPSFPLVERQANEVDWWDMVCNVKKLINEKKEDGKVFWQNLAGYKRQEALLPYLSSEEDRKKGKKFARYQFGDLLLHLEKKHGEDWGKVYDEAWERIDKKVEGLSKHIKLEEERRSEDAQSKAALTDWLRAKASFVIEGLKEADKDEFKRCELKLQKWYGDLRGKPFAIEAENSILDISGFSKQYNCAFIWQKDGVKKLNLYLIINYFKGGKLRFKKIKPEAFEANRFYTVINKKSGEIVPMEVNFNFDDPNLIILPLAFGKRQGREFIWNDLLSLETGSLKLANGRVIEKTLYNRRTRQDEPALFVALTFERREVLDSSNIKPMNLIGIDRGENIPAVIALTDPEGCPLSRFKDSLGNPTHILRIGESYKEKQRTIQAAKEVEQRRAGGYSRKYASKAKNLADDMVRNTARDLLYYAVTQDAMLIFENLSRGFGRQGKRTFMAERQYTRMEDWLTAKLAYEGLPSKTYLSKTLAQYTSKTCSNCGFTITSADYDRVLEKLKKTATGWMTTINGKELKVEGQITYYNRYKRQNVVKDLSVELDRLSEESVNNDISSWTKGRSGEALSLLKKRFSHRPVQEKFVCLNCGFETHADEQAALNIARSWLFLRSQEYKKYQTNKTTGNTDKRAFVETWQSFYRKKLKEVWKPAV

SEQ ID NO: 851 - protein, 978 aa, synthetic construct
  REGION 1..978: note = CasX protein variant
MQEIKRINKIRRRLVKDSNTKKAGKTGPMKTLLVRVMTPDLRERLENLRKKPENIPQPISNTSRANLNKLLTDYTEMKKAILHVYWEEFQKDPVGLMSRVAQPAPKNIDQRKLIPVKDGNERLTSSGFACSQCCQPLYVYKLEQVNDKGKPHTNYFGRCNVSEHERLILLSPHKPEANDELVTYSLGKFGQRALDFYSIHVTRESNHPVKPLEQIGGNSCASGPVGKALSDACMGAVASFLTKYQDIILEHQKVIKKNEKRLANLKDIASANGLAFPKITLPPQPHTKEGIEAYNNVVAQIVIWVNLNLWQKLKIGRDEAKPLQRLKGFPSFPLVERQANEVDWWDMVCNVKKLINEKKEDGKVFWQNLAGYKRQEALLPYLSSEEDRKKGKKFARYQFGDLLLHLEKKHGEDWGKVYDEAWERIDKKVEGLSKHIKLEEERRSEDAQSKAALTDWLRAKASFVIEGLKEADKDEFRRCELKLQKWYGDLRGKPFAIEAENSILDISGFSKQYNCAFIWQKDGVKKLNLYLIINYFKGGKLRFKKIKPEAFEANRFYTVINKKSGEIVPMEVNFNFDDPNLIILPLAFGKRQGREFIWNDLLSLETGSLKLANGRVIEKTLYNRRTRQDEPALFVALTFERREVLDSSNIKPMNLIGIDRGENIPAVIALTDPEGCPLSRFKDSLGNPTHILRIGESYKEKQRTIQAAKEVEQRRAGGYSRKYASKAKNLADDMVRNTARDLLYYAVTQDAMLIFENLSRGFGRQGKRTFMAERQYTRMEDWLTAKLAYEGLPSKTYLSKTLAQYTSKTCSNCGFTITSADYDRVLEKLKKTATGWMTTINGKELKVEGQITYYNRYKRQNVVKDLSVELDRLSEESVNNDISSWTKGRSGEALSLLKKRFSHRPVQEKFVCLNCGFETHADEQAALNIARSWLFLRSQEYKKYQTNKTTGNTDKRAFVETWQSFYRKKLKEVWKPAV

SEQ ID NO: 852 - protein, 978 aa, synthetic construct
  REGION 1..978: note = CasX protein variant
MQEIKRINKIRRRLVKDSNTKKAGKTGPMKTLLVRVMTPDLRERLENLRKKPENIPQPISNTSRANLNKLLTDYTEMKKAILHVYWEEFQKDPVGLMSRVAQPAPKNIDQRKLIPVKDGNERLTSSGFACSQCCQPLYVYKLEQVNDKGKPHTNYFGRCNVSEHERLILLSPHKPEANDELVTYSLGKFGQRALDFYSIHVTRESNHPVKPLEQIGGNSCASGPVGKALSDACMGAVASFLTKYQDIILEHQKVIKKNEKRLANLKDIASANGLAFPKITLPPQPHTKEGIEAYNNVVAQIVIWVNLNLWQKLKIGRDEAKPLQRLKGFPSFPLVERQANEVDWWDMVCNVKKLINEKKEDGKVFWQNLAGYKRQEALLPYLSSEEDRKKGKKFARYQFGDLLLHLEKKHGEDWGKVYDEAWERIDKKVEGLSKHIKLEEERRSEDAQSKAALTDWLRAKASFVIEGLKEADKDEFCRCELKLQKWYGDLRGKPFAIEAENSILDISGFSKQYNCAFIWQKDGVKKLNLYLIINYFKGGKLRFKKIKPEAFEANRFYTVINKKSGEIVPMEVNFNFDDPNLIILPLAFGKRQGREFIWNDLLSLETGSLKLANGRVIEKTLYNRRTRQDEPALFVALTFERREVLDSSNIKPMNLIGIDRGENIPAVIALTDPEGCPLSRFKDSLGNPTHILRIGESYKEKQRTIQAAKEVEQRRAGGYSRKYASKAKNLADDMVRNTTRDLLYYAVTQDAMLIFENLSRGFGRQGKRTFMAERQYTRMEDWLTAKLAYEGLPSKTYLSKTLAQYTSKTCSNCGFTITSADYDRVLEKLKKTATGWMTTINGKELKVEGQITYYNRYKRQNVVKDLSVELDRLSEESVNNDISSWTKGRSGEALSLLKKRFSHRPVQEKFVCLNCGFETHADEQAALNIARSWLFLRSQEYKKYQTNKTTGNTDKRAFVETWQSFYRKKLKEVWKPAV

SEQ ID NO: 853 - protein, 978 aa, synthetic construct
  REGION 1..978: note = CasX protein variant
MQEIKRINKIRRRLVKDSNTKKAGKTGPMKTLLVRVMTPDLRERLENLRKKPENIPQPISNTSRANLNKLLTDYTEMKKAILHVYWEEFQKDPVGLMSRVAQPAPKNIDQRKLIPVKDGNERLTSSGFACSQCCQPLYVYKLEQVNDKGKPHTNYFGRCNVSEHERLILLSPHKPEANDELVTYSLGKFGQRALDFYSIHVTRESNHPVKPLEQIGGNRCASGPVGKALSDACMGAVASFLTKYQDIILEHQKVIKKNEKRLANLKDIASANGLAFPKITLPPQPHTKEGIEAYNNVVAQIVIWVNLNLWQKLKIGRDEAKPLQRLKGFPSFPLVERQANEVDWWDMVCNVKKLINEKKEDGKVFWQNLAGYKRQEALLPYLSSEEDRKKGKKFARYQFGDLLLHLEKKHGEDWGKVYDEAWERIDKKVEGLSKHIKLEEERRSEDAQSKAALTDWLRAKASFVIEGLKEADKDEFCRCELKLQKWYGDLRGKPFAIEAENSILDISGFSKQYNCAFIWQKDGVKKLNLYLIINYFKGGKLRFKKIKPEAFEANRFYTVINKKSGEIVPMEVNFNFDDPNLIILPLAFGKRQGREFIWNDLLSLETGSLKLANGRVIEKTLYNRRTRQDEPALFVALTFERREVLDSSNIKPMNLIGIDRGENIPAVIALTDPEGCPLSRFKDSLGNPTHILRIGESYKEKQRTIQAAKEVEQRRAGGYSRKYASKAKNLADDMVRNTARDLLYYAVTQDAMLIFENLSRGFGRQGKRTFMAERQYTRMEDWLTAKLAYEGLPSKTYLSKTLAQYTSKTCSNCGFTITSADYDRVLEKLKKTATGWMTTINGKELKVEGQITYYNRYKRQNVVKDLSVELDRLSEESVNNDISSWTKGRSGEALSLLKKRFSHRPVQEKFVCLNCGFETHADEQAALNIARSWLFLRSQEYKKYQTNKTTGNTDKRAFVETWQSFYRKKLKEVWKPAV

SEQ ID NO: 854 - protein, 978 aa, synthetic construct
  REGION 1..978: note = CasX protein variant
MQEIKRINKIRRRLVKDSNTKKAGKTGPMKTLLVRVMTPDLRERLENLRKKPENIPQPISNTSRANLNKLLTDYTEMKKAILHVYWEEFQKDPVGLMSRVAQPAPKNIDQRKLIPVKDGNERLTSSGFACSQCCQPLYVYKLEQVNDKGKPHTNYFGRCNVSEHERLILLSPHKPEANDELVTYSLGKFGQRALDFYSIHVTRESNHPVKPLEQIGGNSCASGPVGKALSDACMGAVASFLTKYQDIILEHQKVIKKNEKRLANLKDIASANGLAFPKITLPPQPHTKEGIEAYNNVVAQIVIWVNLNLWQKLKIGRDEAKPLQRLKGFPSFPLVERQANEVDWWDMVCNVKKLINEKKEDGKVFWQNLAGYKRQEALLPYLSSEEDRKKGKKFARYQFGDLLLHLEKKHGEDWGEVYDEAWERIDKKVEGLSKHIKLEEERRSEDAQSKAALTDWLRAKASFVIEGLKEADKDEFCRCELKLQKWYGDLRGKPFAIEAENSILDISGFSKQYNCAFIWQKDGVKKLNLYLIINYFKGGKLRFKKIKPEAFEANRFYTVINKKSGEIVPMEVNFNFDDPNLIILPLAFGKRQGREFIWNDLLSLETGSLKLANGRVIEKTLYNRRTRQDEPALFVALTFERREVLDSSNIKPMNLIGIDRGENIPAVIALTDPEGCPLSRFKDSLGNPTHILRIGESYKEKQRTIQAKKEVEQRRAGGYSRKYASKAKNLADDMVRNTARDLLYYAVTQDAMLIFENLSRGFGRQGKRTFMAERQYTRMEDWLTAKLAYEGLPSKTYLSKTLAQYTSKTCSNCGFTITSADYDRVLEKLKKTATGWMTTINGKELKVEGQITYYNRYKRQNVVKDLSVELDRLSEESVNNDISSWTKGRSGEALSLLKKRFSHRPVQEKFVCLNCGFETHADEQAALNIARSWLFLRSQEYKKYQTNKTTGNTDKRAFVETWQSFYRKKLKEVWKPAV

SEQ ID NO: 855 - protein, 978 aa, synthetic construct
  REGION 1..978: note = CasX protein variant
MQEIKRINKIRRRLVKDSNTKKAGKTGPMKTLLVRVMTPDLRERLENLRKKPENIPQPISNTSRANLNKLLTDYTEMKKAILHVYWEEFQKDPVGLMSRVAQPAPKNIDQRKLIPVKDGNERLTSSGFACSQCCQPLYVYKLEQVNDKGKPHTNYFGRCNVSEHERLILLSPHKPEANDELVTYSLGKFGQRALDFYSIHVTRESNHPVKPLEQIGGNSCASGPVGKALSDACMGAVASFLTKYQDIILEHQKVIKKNEKRLANLKDIASANGLAFPKITLPPQPHTKEGIEAYNNVVAQIVIWVNLNLWQKLKIGRDEAKPLQRLKGFPSFPLVERQANEVDWWDMVCNVKKLINEKKEDGKVFWQNLAGYKRQEALRPYLSSEEDRKKGKKFARYQFGDLLLHLEKKHGEDWGKVYDEAWERIDKKVEGLSKHIKLEEERRSEDAQSKAALTDWLRAKASFVIEGLKEADKDEFCRCELKLQKWYGDLRGKPFAIEAENSILDISGFSKQYNCAFIWQKDGVKKLNLYLIINYFKGGKLRFKKIKPEAFEANRFYTVINKKSGEIVPMEVNFNFDDPNLIILPLAFGKRQGREFIWNDLLSLETGSLKLANGRVIEKTLYNRRTRQDEPALFVALTFERREVLDSSNIKPMNLIGIDRGENIPAVIALTDPEGCPLSRFKDSLGNPTHILRIGESYKEKQRTIQAAKEVEQRRAGGYSRKYASKAKNLADDMVRNTARDLLYYAVTQDAMLIFENLSRGFGRQGKRTFMAERQYTRMEDWLTAKLAYEGLPSKTYLSKTLAQYTSKTCSNCGFTITSADYDRVLEKLKKTATGWMTTINGKELKVEGQITYYNRYKRQNVVKDLSVELDRLSEESVNNDISSWTKGRSGEALSLLKKRFSHRPVQEKFVCLNCGFETHADEQAALNIARSWLFLRSQEYKKYQTNKTTGNTDKRAFVETWQSFYRKKLKEVWKPAV

SEQ ID NO: 856 - protein, 978 aa, synthetic construct
  REGION 1..978: note = CasX protein variant
MQEIKRINKIRRRLVKDSNTKKAGKTGPMKTLLVRVMTPDLRERLENLRKKPENIPQPISNTSRANLNKLLTDYTEMKKAILHVYWEEFQKDPVGLMSRVAQPAPKNIDQRKLIPVKDGNERLTSSGFACSQCCQPLYVYKLEQVNDKGKPHTNYFGRCNVSEHERLILLSPHKPEANDELVTYSLGKFGQRALDFYSIHVTRESNHPVKPLEQIGGNSCASGPVGKALSDACMGAVASFLTKYQDIILEHQKVIKKNEKRLANLKDIASANGLAFPKITLPPQPHTKEGIEAYNNVVAQIVIWVNLNLWQKLKIGRDEAKPLQRLKGFPSFPLVERQANEVDWWDMVCNVKKLINEKKEDGKVFWQNLAGYKRQEALLPYLSSKEDRKKGKKFARYQFGDLLLHLEKKHGEDWGKVYDEAWERIDKKVEGLSKHIKLEEERRSEDAQSKAALTDWLRAKASFVIEGLKEADKDEFCRCELKLQKWYGDLRGKPFAIEAENSILDISGFSKQYNCAFIWQKDGVKKLNLYLIINYFKGGKLRFKKIKPEAFEANRFYTVINKKSGEIVPMEVNFNFDDPNLIILPLAFGKRQGREFIWNDLLSLETGSLKLANGRVIEKTLYNRRTRQDEPALFVALTFERREVLDSSNIKPMNLIGIDRGENIPAVIALTDPEGCPLSRFKDSLGNPTHILRIGESYKEKQRTIQAAKEVEQRRAGGYSRKYASKAKNLADDMVRNTARDLLYYAVTQDAMLIFENLSRGFGRQGKRTFMAERQYTRMEDWLTAKLAYEGLPSKTYLSKTLAQYTSKTCSNCGFTITSADYDRVLEKLKKTATGWMTTINGKELKVEGQITYYNRYKRQNVVKDLSVELDRLSEESVNNDISSWTKGRSGEALSLLKKRFSHRPVQEKFVCLNCGFETHADEQAALNIARSWLFLRSQEYKKYQTNKTTGNTDKRAFVETWQSFYRKKLKEVWKPAV

SEQ ID NO: 857 - protein, 978 aa, synthetic construct
  REGION 1..978: note = CasX protein variant
MQEIKRINKIRRRLVKDSNTKKAGKTGPMKTLLVRVMTPDLRERLENLRKKPENIPQPISNTSRANLNKLLTDYTEMKKAILHVYWEEFQKDPVGLMSRVAQPAPKNIDQRKLIPVKDGNERLTSSGFACSQCCQPLYVYKLEQVNDKGKPHTNYFGRCNVSEHERLILLSPHKPEANDELVTYSLGKFGQRALDFYSIHVTRESNHPVKPLEQIGGNSCASGPVGKALSDACMGAVASFLTKYQDIILEHQKVIKKNEKRLANLKDIASANGLAFPKITLPPQPHTKEGIEAYNNVVAQIVIWVNLNLWQKLKIGRDEAKPLQRLKGFPSFPLVERQANEVDWWDMVCNVKKLINEKKEDGKVFWQNLAGYKRQEALLPYLSSEEDRKKGKKFARYQFGDLLLHLEKKHGEDWGKVYDEAWERIDKKVEGLSKHIKLEEERRSEDAQSKAALTDWLRAKASFVIEGLKEADKDEFCRCELKLQKWYGDLRGKPFAIEAENSILDISGFSKQYNCAFIWQKDGVKKLNLYLIINYFKGGKLRFKKIKPEAFEANRFYTVINKKSGEIVPMEVNFNFDDPNLIILPLAFGKRQGREFIWNDLLSLETGSLKLANGRVIEKTLYNRRTRQDEPALFVALTFERREVLDSSNIKPMNLIGIDRGENIPAVIALTDPEGCPLSRFKDSLGNPTHILRIHESYKEKQRTIQAAKEVEQRRAGGYSRKYASKAKNLADDMVRNTARDLLYYAVTQDAMLIFENLSRGFGRQGKRTFMAERQYTRMEDWLTAKLAYEGLPSKTYLSKTLAQYTSKTCSNCGFTITSADYDRVLEKLKKTATGWMTTINGKELKVEGQITYYNRYKRQNVVKDLSVELDRLSEESVNNDISSWTKGRSGEALSLLKKRFSHRPVQEKFVCLNCGFETHADEQAALNIARSWLFLRSQEYKKYQTNKTTGNTDKRAFVETWQSFYRKKLKEVWKPAV

SEQ ID NO: 858 - protein, 977 aa, synthetic construct
  REGION 1..977: note = CasX protein variant
MQEIKRINKIRRRLVKDSNTKKAGKTGPMKTLLVRVMTPDLRERLENLRKKPENIPQPISNTSRANLNKLLTDYTEMKKAILHVYWEEFQKDPVGLMSRVAQPAPKNIDQRKLIPVKDGNERLTSSGFACSQCCQPLYVYKLEQVNDKGKPHTNYFGRCNVSEHERLILLSPHKPEANDELVTYSLGKFGQRALDFYSIHVTRESNHPVKPLEQIGGNSCASGPVGKALSDACMGAVASFLTKYQDIILEHQKVIKKNEKRLANLKDIASANGLAFPKITLPPQPHTKEGIEAYNNVVAQIVIWVNLNLWQKLKIGRDEAKPLQRLKGFPSFPLVERQANEVDWWDMVCNVKKLINEKKEDGKVFWQNLAGYKRQEALRPYLSSEEDRKKGKKFARYQFGDLLLHLEKKHGEDWGKVYDEAWERIDKKVEGLSKHIKLEEERRSEDAQSKAALTDWLRAKASFVIEGLKEADKDEFKRCELKLQKWYGDLRGKPFAIEAENSILDISGFSKQYNCAFIWQKDGVKKLNLYLIINYFKGGKLRFKKIKPEAFEANRFYTVINKKSGEIVPMEVNFNFDDPNLIILPLAFGKRQGREFIWNDLLSLETGSLKLANGRVIEKTLYNRRTRQDEPALFVALTFERREVLDSSNIKPMNLIGIDRGENIPAVIALTDPEGCPLSRFKDSLGNPTHILRIGESYKEKQRTIQAKKEVEQRRAGGYSRKYASKAKNLADDMVRNTTRDLLYYAVTQDAMLIFENLSRGFGRQGKRTFMAERQYTRMEDWLTAKLAYEGLSKTYLSKTLAQYTSKTCSNCGFTITSADYDRVLEKLKKTATGWMTTINGKELKVEGQITYYNRYKRQNVVKDLSVELDRLSEESVNNDISSWTKGRSGEALSLLKKRFSHRPVQEKFVCLNCGFETHADEQAALNIARSWLFLRSQEYKKYQTNKTTGNTDKRAFVETWQSFYRKKLKEVWKPAV

SEQ ID NO: 859 - protein, 978 aa, synthetic construct
  REGION 1..978: note = CasX protein variant
MQEIKRINKIRRRLVKDSNTKKAGKTGPMKTLLVRVMTPDLRERLENLRKKPENIPQPISNTSRANLNKLLTDYTEMKKAILHVYWEEFQKDPVGLMSRVAQPAPKNIDQRKLIPVKDGNERLTSSGFACSQCCQPLYVYKLEQVNDKGKPHTNYFGRCNVSEHERLILLSPHKPEANDELVTYSLGKFGQRALDFYSIHVTRESNHPVKPLEQIGGNSCASGPVGKALSDACMGAVASFLTKYQDIILEHQKVIKKNEKRLANLKDIASANGLAFPKITLPPQPHTKEGIRAYNNVVAQIVIWVNLNLWQKLKIGRDEAKPLQRLKGFPSFPLVERQANEVDWWDMVCNVKKLINEKKEDGKVFWQNLAGYKRQEALLPYLSSEEDRKKGKKFARYQFGDLLLHLEKKHGEDWGKVYDEAWERIDKKVEGLSKHIKLEEERRSEDAQSKAALTDWLRAKASFVIEGLKEADKDEFCRCELKLQKWYGDLRGKPFAIEAENSILDISGFSKQYNCAFIWQKDGVKKLNLYLIINYFKGGKLRFKKIKPEAFEANRFYTVINKKSGEIVPMEVNFNFDDPNLIILPLAFGKRQGREFIWNDLLSLETGSLKLANGRVIEKTLYNRRTRQDEPALFVALTFERREVLDSSNIKPMNLIGIDRGENIPAVIALTDPEGCPLSRFKDSLGNPTHILRIGESYKEKQRTIQAAKEVEQRRAGGYSRKYASKAKNLADDMVRNTARDLLYYAVTQDAMLIFENLSRGFGRQGKRTFMAERQYTRMEDWLTAKLAYEGLPSKTYLSKTLAQYTSKTCSNCGFTITSADYDRVLEKLKKTATGWMTTINGKELKVEGQITYYNRYKRQNVVKDLSVELDRLSEESVNNDISSWTKGRSGEALSLLKKRFSHRPVQEKFVCLNCGFETHADEQAALNIARSWLFLRSQEYKKYQTNKTTGNTDKRAFVETWQSFYRKKLKEVWKPAV

SEQ ID NO: 860 - protein, 978 aa, synthetic construct; identical to SEQ ID NO: 824
  REGION 1..978: note = CasX protein variant

SEQ ID NO: 861 - protein, 978 aa, synthetic construct
  REGION 1..978: note = CasX protein variant
MQEIKRINKIRRRLVKDSNTKKAGRTGPMKTLLVRVMTPDLRERLENLRKKPENIPQPISNTSRANLNKLLTDYTEMKKAILHVYWEEFQKDPVGLMSRVAQPAPKNIDQRKLIPVKDGNERLTSSGFACSQCCQPLYVYKLEQVNDKGKPHTNYFGRCNVSEHERLILLSPHKPEANDELVTYSLGKFGQRALDFYSIHVTRESNHPVKPLEQIGGNSCASGPVGKALSDACMGAVASFLTKYQDIILEHQKVIKKNEKRLANLKDIASANGLAFPKITLPPQPHTKEGIEAYNNVVAQIVIWVNLNLWQKLKIGRDEAKPLQRLKGFPSFPLVERQANEVDWWDMVCNVKKLINEKKEDGKVFWQNLAGYKRQEALLPYLSSEEDRKKGKKFARYQFGDLLLHLEKKHGEDWGKVYDEAWERIDKKVEGLSKHIKLEEERRSEDAQSKAALTDWLRAKASFVIEGLKEADKDEFCRCELKLQKWYGDLRGKPFAIEAENSILDISGFSKQYNCAFIWQKDGVKKLNLYLIINYFKGGKLRFKKIKPEAFEANRFYTVINKKSGEIVPMEVNFNFDDPNLIILPLAFGKRQGREFIWNDLLSLETGSLKLANGRVIEKTLYNRRTRQDEPALFVALTFERREVLDSSNIKPMNLIGIDRGENIPAVIALTDPEGCPLSRFKDSLGNPTHILRIGESYKEKQRTIQAAKEVEQRRAGGYSRKYASKAKNLADDMVRNTARDLLYYAVTQDAMLIFENLSRGFGRQGKRTFMAERQYTRMEDWLTAKLAYEGLPSKTYLSKTLAQYTSKTCSNCGFTITSADYDRVLEKLKKTATGWMTTINGKELKVEGQITYYNRYKRQNVVKDLSVELDRLSEESVNNDISSWTKGRSGEALSLLKKRFSHRPVQEKFVCLNCGFETHADEQAALNIARSWLFLRSQEYKKYQTNKTTGNTDKRAFVETWQSFYRKKLKEVWKPAV

SEQ ID NO: 862 - protein, 978 aa, synthetic construct
  REGION 1..978: note = CasX protein variant
MQEIKRINKIRRRLVKDSNTKKAGKTGPMKTLLVRVMTPDLRERLENLRKKPENIPQPISNTSRANLNKLLTDYTEMKKAILHVYWEEFQKDPVGLMSRVAQPAPKNIDQRKLIPVKDGNERLTSSGFACSQCCQPLYVYKLEQVNDKGKPHTNYFGRCNVSEHERLILLSPHKPEANDELVTYSLGKFGQRALDFYSIHVTRESNHPVKPLEQIGGNSCASGPVGKALSDACMGAVASFLTKYQDIILEHQKVIKKNEKRLANLKDIASANGLAFPKITLPPQPHTKEGIEAYNNVVAQIVIWVNLNLWQKLKIGRDEAKPLQRLKGFPSFPLVERQANEVDWWDMVCNVKKLINEKKEDGKVFWQNLAGYKRQEALLPYLSSEEDRKKGKKFARYQFGDLLLHLEKKHGEDWGKVYDEAWERIDKKVEGLSKHIKLEEERRSEDAQSKAALTDWLRAKASFVIEGLKEADKDEFCRCELKLQKWYGDLRGKPFAIEAENSILDISGFSKQYNCAFIWQKDGVKKLNLYLIINYFKGGKLRFKKIKPEAFEANRFYTVINKKSGEIVPMEVNFNFDDPNLIILPLAFGKRQGREFIWNDLLSLETGSLKLANGRVIEKTLYNRRTRQDEPALFVALTFERREVLDSSNIKPMNLIGIDRGENIPAVIALTDPEGCPLSRFKDSLGNPTHILRIGESYKEKQRTIQAAKEVEQRRAGGYSRKYASKAKNLADDMVRNTARDLLYYAVTQDAMLIFENLSRGFGRQGKRTFMAERQYTRMEDWLTAKLAYEGLPSKTYLSKTLAQYTSKTCSNCGFTITSADYDRVLEKLKKTATGWMTTINGKELKVEGQITYYNRYKRQNVVKDLSVELDRLSEESVNNDISSWTKGRSGEALSLLKKRFSHRPVQEKFVCLNCGFETHADEQAALNIARSWLFLRSQEYKKYQTNKTTGNTDKRAFVETWQSFYRKKLKEVWRPAV

SEQ ID NO: 863 - protein, 978 aa, synthetic construct
  REGION 1..978: note = CasX protein variant
MQEIKRINKIRRRLVKDSNTKKAGKTGPMKTLLVRVMTPDLRERLENLRKKPENIPQPISNTSRANLNKLLTDYTEMKKAILHVYWEEFQKDPVGLMSRVAQPAPKNIDQRKLIPVKDGNERLTSSGFACSQCCQPLYVYKLEQVNDKGKPHTNYFGRCNVSEHERLILLSPHKPEANDELVTYSLGKFGQRALDFYSIHVTRESNHPVKPLEQIGGNSCASGPVGKALSDACMGAVASFLTKYQDIILEHQKVIKKNEKRLANLKDIASANGLAFPKITLPPQPHTKEGIEAYNNVVAQIVIWVNLNLWQKLKIGRDEAKPLQRLKGFPSFPLVERQANEVDWWDMVCNVKKLINEKKEDGKVFWQNLAGYKRQEALLPYLSSEEDRKKGKKFARYQFGDLLLHLEKKHGEDWGKVYDEAWERIDKKVEGLSKHIKLEEERRSEDAQSKAALTDWLRAKASFVIEGLKEADKDEFCRCELKLQKWYGDLRGKPFAIEAENSILDISGFSKQYNCAFIWQKDGVKKLNLYLIINYFKGGKLRFKKIKPEAFEANRFYTVINKKSGEIVPMEVNFNFDDPNLIILPLAFGKRQGREFIWNDLLSLETGSLKLANGRVIEKTLYNRRTRQDEPALFVALTFERREVLDSSNIKPMNLIGIDRGENIPAVIALTDPEGCPLSRFKDSLGNPTHILRIGESYKEKQRTIQAAKEVEQRRAGGYSRKYASKAKNLADDMVRNTARDLLYYAVTQDAMLIFENLSRGFGRQGKRTFMAERQYTRMEDWLTAKLAYEGLPSKTYLSKTLAQYTSKTCSNCGFTITSADYDRVLEKLKKTATGWMTTINGKELKVEGQITYYNRYKRQNVVKDLSVELDRLSEESVNNDISSWTKGRSGEALSLLKKRFSHRPVQEKFVCLNCGFETHADEQAALNIARSWLFLRSQEYKKYQTNKTTGNTDKRAFMETWQSFYRKKLKEVWKPAV

SEQ ID NO: 864 - protein, 978 aa, synthetic construct
  REGION 1..978: note = CasX protein variant
MQEIKRINKIRRRLVKDSNTKKAGKTGPMKTLLVRVMTPDLRERLENLRKKPENIPQPISNTSRANLNKLLTDYTEMKKAILHVYWEEFQKDPVGLMSRVAQPAPKNIDQRKLIPVKDGNERLTSSGFACSQCCQPLYVYKLEQVNDKGKPHTNYFGRCNVSEHERLILLSPHKPEANDELVTYSLGKFGQRALDFYSIHVTRESNHPVKPLEQIGGNSCASGPVGKALSDACMGAVASFLTKYQDIILEHQKVIKKNEKRLANLKDIASANGLAFPKITLPPQPHTKEGIEAYNNVVAQIVIWVNLNLWQKLKIGRDEAKPLQRLKGFPSFPLVERQANEVDWWDMVCNVKKLINEKKEDGKVFWQNLAGYKRQEALLPYLSSEEDRKKGKKFARYQFGDLLLHLEKKHGEDWGKVYDEAWERIDKKVEGLSKHIKLEEERRSEDAQSKAALTDWLRAKASFVIEGLKEADKDEFCRCELKLQKWYGSLRGKPFAIEAENSILDISGFSKQYNCAFIWQKDGVKKLNLYLIINYFKGGKLRFKKIKPEAFEANRFYTVINKKSGEIVPMEVNFNFDDPNLIILPLAFGKRQGREFIWNDLLSLETGSLKLANGRVIEKTLYNRRTRQDEPALFVALTFERREVLDSSNIKPMNLIGIDRGENIPAVIALTDPEGCPLSRFKDSLGNPTHILRIGESYKEKQRTIQAAKEVEQRRAGGYSRKYASKAKNLADDMVRNTARDLLYYAVTQDAMLIFENLSRGFGRQGKRTFMAERQYTRMEDWLTAKLAYEGLPSKTYLSKTLAQYTSKTCSNCGFTITSADYDRVLEKLKKTATGWMTTINGKELKVEGQITYYNRYKRQNVVKDLSVELDRLSEESVNNDISSWTKGRSGEALSLLKKRFSHRPVQEKFVCLNCGFETHADEQAALNIARSWLFLRSQEYKKYQTNKTTGNTDKRAFVETWQSFYRKKLKEVWKPAV

SEQ ID NO: 865 - protein, 978 aa, synthetic construct
  REGION 1..978: note = CasX protein variant
MQEIKRINKIRRRLVKDSNTKKAGKTGPMKTLLVRVMTPDLRERLENLRKKPENIPQPISNTSRANLNKLLTDYTEMKKAILHVYWEEFQKDPVGLMSRVAQPAPKNIDQRKLIPVKDGNERLTSSGFACSQCCQPLYVYKLEQVNDKGKPHTNYFGRCNVSEHERLILLSPHKPEANDELVTYSLGKFGQRALDFYSIHVTRESNHPVKPLEQIGGNSCASGPVGKALSDACMGAVASFLTKYQDIILEHQKVIKKNEKRLANLKDIASANGLAFPKITLPPQPHTKEGIEAYNNVVAQIVIWVNLNLWQKLKIGRDEAKPLQRLKGFPSFPLVERQANEVDWWDMVCNVKKLINEKKEDGKVFWQNLAGYKRQEALLPYLSSEEDRKKGKKFARYQFGDLLLHLEKKHGEDWGKVYDEAWERIDKKVEGLSKHIKLEEERRSEDAQSKAALTDWLRAKASFVIEGLKEADKDEFCRCELKLQKWYGDLRGKPFAIEAENSILDISGFSKQYNCAFIWQKDGVKKLNLYLIINYFKGGKLRFKKIKPEAFEANRFYTVINKKSGEIVPMEVNFNFDDPNLIILPLAFGKRQGREFIWNDLLSLETGSLKLANGRVIEKTLYNRRTRQDEPALFVALTFERREVLDSSNIKPMNLIGIDRGENIPAVIALTDPEGCPLSRFKDSLGNPTHILRIGESYKEKQRTIQAAKEVEQRRAGGYSRKYASKAKNLADDMVRNTARDLLYYAVTQDAMLIFENLSRGFGRQGKRTFMAERQYTRMEDWLTAKLAYEGLPSKTYLSKTLAQYTSSTCSNCGFTITSADYDRVLEKLKKTATGWMTTINGKELKVEGQITYYNRYKRQNVVKDLSVELDRLSEESVNNDISSWTKGRSGEALSLLKKRFSHRPVQEKFVCLNCGFETHADEQAALNIARSWLFLRSQEYKKYQTNKTTGNTDKRAFVETWQSFYRKKLKEVWKPAV

SEQ ID NO: 866 - protein, 978 aa, synthetic construct
  REGION 1..978: note = CasX protein variant
MQEIKRINKIRRRLVKDSNTKKAGKTGPMKTLLVRVMTPDLRERLENLRKKPENIPQPISNTSRANLNKLLTDYTEMKKAILHVYWEEFQKDPVGLMSRVAQPAPKNIDQRKLIPVKDGNERLTSSGFACSQCCQPLYVYKLEQVNDKGKPHTNYFGRCNVSEHERLILLSPHKPEANDELVTYSLGKFGQRALDFYSIHVTRESNHPVKPLEQIGGNSCASGPVGKALSDACMGAVASFLTKYQDIILEHQKVIKKNEKRLANLKDIASANGLAFPKITLPPQPHTKEGIEAYNNVVAQIVIWVNLNLWQKLKIGRDEAKPLQRLKGFPSFPLVERQANEVDWWDMVCNVKKLINEKKEDGKVFWQNLAGYKRQEALLPYLSSEEDRKKGKKFARYQFGDLLLHLEKKHGEDWGKVYDEAWERIDKKVEGLSKHIKLEEERRSEDAQSKAALTDWLRAKASFVIEGLKEADKDEFCRCELKLQKWYGDLRGKPFAIEAENSILDISGFSKQYNCAFIWQKDGVKKLNLYLIINYFKGGKLRFKKIKPEAFEANRFYTVINKKSGEIVPMEVNFNFDDPNLIILPLAFGKRQGREFIWNDLLSLETGSLKLANGRVIEKTLYNRRTRQDEPALFVALTFERREVLDSSNIKPMNLIGIDRGENIPAVIALTDPEGCPLSRFKDSLGNPTHILRIGESYKEKQRTIQAAKEVEQRRAGGYSRKYASKAKNLADDMVRNTARDLLYYAVTQDAMLIFENLSRGFGRQGKRTFMAERQYTRMEDWLTAKLAYEGLPSKTYLSKTLAQYTSKTCSNCGFTITSADYDRVLEKLKKTATGWMTTINGKELKVEGQITYYNRYKRQNVVKDLSVELDRLSEESVNNDISSWTKGRSGEALSLLKKRFSHRPVQEKFVCLNCGFETHADEQAALNIARSWLFLRSQEYKKYQTNKTTGTTDKRAFVETWQSFYRKKLKEVWKPAV

SEQ ID NO: 867 - protein, 978 aa, synthetic construct
  REGION 1..978: note = CasX protein variant
MQEIKRINKIRRRLVKDSNTKKAGKTGPMKTLLVRVMTPDLRERLENLRKKPENIPQPISNTSRANLNKLLTDYTEMKKAILHVYWEEFQKDPVGLMSRVAQPAPKNIDQRKLIPVKDGNERLTSSGFACSQCCQPLYVYKLEQVNDKGKPHTNYFGRCNVSEHERLILLSPHKPEANDELVTYSLGKFGQRALDFYSIHVTRESNHPVKPLEQIGGNSCASGPVGKALSDACMGAVASFLTKYQDIILEHQKVIKKNEKRLANLKDIASANGLAFPKITLPPQPHTKEGIEAYNNVVAQIVIWVNLNLWQKLKIGRDEAKPLQRLKGFPSFPLVERQANEVDWWDMVCNVKKLINEKKEDGKVFWQNLAGYKRQEALLPYLSSEEDRKKGKKFARYQFGDLLLHLEKKHGEDWGKVYDEAWERIDKKVEGLSKHIKLEEERRSEDAQSKAALTDWLRAKASFVIEGLKEADKDEFCRCELKLQKWYGDLRGKPFAIEAENSILDISGFSKQYNCAFIWQKDGVKKLNLYLIINYFKGGKLRFKKIKPEAFEANRFYTVINKKSGEIVPMEVNFNFDDPNLIILPLAFGKRQGREFIWNDLLSLETGSLKLANGRVIEKTLYNRRTRQDEPALFVALTFERREVLDSSNIKPMNLIGIDRGENIPAVIALTDPEGCPLSRFKDSLGNPTHILRIGESYKEKQRTIQAAKEVEQRRAGGYSRKYASKAKNLADDMVRNTARDLLYYAVTQDAMLIFENLSRGFGRQGKRTFMAERQYTRMEDWLTAKLAYEGLPSKTYLSKTLAQYTSKTCSNCGFTITSADYDRVLEKLKKTATGWMTTINGKELKVEGQITYYNRYKRQNVVKDLSVELDRLSEESVNNDISSWTKGRSGEALSLLKKRFSHRPVQEKFVCLNCGFETHADEQAALNIARSWLFLRSQEYKKYQTNKTTGNTDKRAFVETWQSFYRKKLKEVWQPAV

SEQ ID NO: 868 - protein, 978 aa, synthetic construct
  REGION 1..978: note = CasX protein variant
MQEIKRINKIRRRLVKDSNTKKAGKTGPMKTLLVRVMTPDLRERLENLRKKPENIPQPISNTSRANLNKLLTDYTEMKKAILHVYWEEFQKDPVGLMSRVAQPAPKNIDQRKLIPVKDGNERLTSSGFACSQCCQPLYVYKLEQVNDKGKPHTNYFGRCNVSEHERLILLSPHKPEANDELVTYSLGKFGQRALDFYSIHVTRESNHPVKPLEQIGGNSCASGPVGKALSDACMGAVASFLTKYQDIILEHQKVIKKNEKRLANLKDIASANGLAFPKITLPPQPHTKEGIEAYNNVVAQIVIWVNLNLWQKLKIGRDEAKPLQRLKGFPSFPLVERQANEVDWWDMVCNVKKLINEKKEDGKVFWQNLAGYKRQEALLPYLSSEEDRKKGKKFARYQFGDLLLHLEKKHGEDWGKVYDEAWERIDKKVEGLSKHIKLEEERRSEDAQSKAALTDWLRAKASFVIEGLKEADKDEFCRCELKLQKWYGDLRGKPFAIEAENSILDISGFSKQYNCAFIWQKDGVKKLNLYLIINYFKGGKLRFKKIKPEAFEANRFYTVINKKSGEIVPMEVNFNFDDPNLIILPLAFGKRQGREFIWNDLLSLETGSLKLANGRVIEKTLYNRRTRQDEPALFVALTFERREVLDSSNIKPMNLIGIDRGENIPAVIALTDPEGCPLSRFKDSLGNPTHILRIGESYKEKQRTIQAAKEVEQRRAGGYSRKYASKAKNLADDMVRNTARDLLYYAVTQDAMLIFENLSRGFGRQGKRTFMAERQYTRMEDWLTAKLAYEGLPSKTYLSKTLAQYTSKTCSNCGFTITSADYDRVLEKLKKTATGWMTTINGKELKVEGQITYYNRYKRQNVVKDLSVELDRLSEESVNNDISSWTKGRRGEALSLLKKRFSHRPVQEKFVCLNCGFETHADEQAALNIARSWLFLRSQEYKKYQTNKTTGNTDKRAFVETWQSFYRKKLKEVWKPAV

SEQ ID NO: 869 - protein, 977 aa, synthetic construct
  REGION 1..977: note = CasX protein variant
MQEIKRINKIRRRLVKDSNTKKAGKTGPMKTLLVRVMTPDLRERLENLRKKPENIPQPISNTSRANLNKLLTDYTEMKKAILHVYWEEFQKDPVGLMSRVAQPAPKNIDQRKLIPVKDGNERLTSSGFACSQCCQPLYVYKLEQVNDKGKPHTNYFGRCNVSEHERLILLSPHKPEANDELVTYSLGKFGQRALDFYSIHVTRESNHPVKPLEQIGGNSCASGPVGKALSDACMGAVASFLTKYQDIILEHQKVIKKNEKRLANLKDIASANGLAFPKITLPPQPHTKEGIEAYNNVVAQIVIWVNLNLWQKLKIGRDEAKPLQRLKGFPSFPLVERQANEVDWWDMVCNVKKLINEKKEDGKVFWQNLAGYKRQEALLPYLSSEEDRKKGKKFARYQFGDLLLHLEKKHGEDWGKVYDEAWERIDKKVEGLSKHIKLEEERRSEDAQSKAALTDWLRAKASFVIEGLKEADKDEFCRCELKLQKWYGDLRGKPFAIEAENSILDISGFSKQYNCAFIWQKDGVKKLNLYLIINYFKGGKLRFKKIKPEAFEANRFYTVINKKSGEIVPMEVNFNFDDPNLIILPLAFGKRQGREFIWNDLLSLETGSLKLANGRVIEKTLYNRRTRQDEPALFVALTFERREVLDSSNIKPMNLIGIDRGENIPAVIALTDPEGCPLSRFKDSLGNPTHILRIGESYKEKQRTIQAAKEVEQRRAGGYSRKYASKAKNLADDMVRNTARDLLYYAVTQDAMLIFENLSRGFGRQGKRTFMAERQYTRMEDWLTAKLAYEGLSKTYLSKTLAQYTSKTCSNCGFTITSADYDRVLEKLKKTATGWMTTINGKELKVEGQITYYNRYKRQNVVKDLSVELDRLSEESVNNDISSWTKGRSGEALSLLKKRFSHRPVQEKFVCLNCGFETHADEQAALNIARSWLFLRSQEYKKYQTNKTTGNTDKRAFVETWQSFYRKKLKEVWKPAV

SEQ ID NO: 870 - protein, 978 aa, synthetic construct
  REGION 1..978: note = CasX protein variant
MQEIKRINKIRRRLVKDSNTKKAGKTGPMKTLLVRVMTPDLRERLENLRKKPENIPQPISNTSRANLNKLLTDYTEMKKAILHVYWEEFQKDPVGLMSRVAQPAPKNIDQRKLIPVKDGNERLTSSGFACSQCCQPLYVYKLEQVNDKGKPHTNYFGRCNVSEHERLILLSPHKPEANDELVTYSLGKFGQRALDFYSIHVTRESNHPVKPLEQIGGNSCASGPVGKALSDACMGAVASFLTKYQDIILEHQKVIKKNEKRLANLKDIASANGLAFPKITLPPQPHTKEGIEAYNNVVAQIVIWVNLNLWQKLKIGRDEAKPLQRLKGFPSFPLVERQANEVDWWDMVCNVKKLINEKKEDGKVFWQNLAGYKRQEALLPYLSSEEDRKKGKKFARYQFGDLLLHLEKKHGEDWGKVYDEAWERIDKKVEGLSKHIKLEEERRSEDAQSKAALTDWLRAKASFVIEGLKEADKDEFCRCELKLQKWYGDLRGKPFAIEAENSILDISGFSKQYNCAFIWQKDGVKKLNLYLIINYFKGGKLRFKKIKPEAFEANRFYTVINKKSGEIVPMEVNFNFDDPNLIILPLAFGKRQGREFIWNDLLSLETGSLKLANGRVIEKTLYNRRTRQDEPALFVALTFERREVLDSSNIKPMNLIGIDRGENIPAVIALTDPEGCPLSRFKDSLGNPTHILRIGESYKEKQRTIQAAKEVEQRRAGGYSRKYASKAKNLADDMVRNTARDLLYYAVTQDAMLIFENLSRGFGRQGKRTFMAERQYTRMEDWLTAKLWYEGLPSKTYLSKTLAQYTSKTCSNCGFTITSADYDRVLEKLKKTATGWMTTINGKELKVEGQITYYNRYKRQNVVKDLSVELDRLSEESVNNDISSWTKGRSGEALSLLKKRFSHRPVQEKFVCLNCGFETHADEQAALNIARSWLFLRSQEYKKYQTNKTTGNTDKRAFVETWQSFYRKKLKEVWKPAV

SEQ ID NO: 871 - protein, 978 aa, synthetic construct
  REGION 1..978: note = CasX protein variant
MQEIKRINKIRRRLVKDSNTKKAGKTGPMKTLLVRVMTPDLRERLENLRKKPENIPQPISNTSRANLNKLLTDYTEMKKAILHVYWEEFQKDPVGLMSRVAQPAPKNIDQRKLIPVKDGNERLTSSGFACSQCCQPLYVYKLEQVNDKGKPHTNYFGRCNVSEHERLILLSPHKPEANDELVTYSLGKFGQRALDFYSIHVTRESNHPVKPLEQIGGNSCASGPVGKALSDACMGAVASFLTKYQDIILEHQKVIKKNEKRLANLKDIASANGLAFPKITLPPQPHTKEGIEAYNNVVAQIVIWVNLNLWQKLKIGRDEAKPLQRLKGFPSFPLVERRENEVDWWDMVCNVKKLINEKKEDGKVFWQNLAGYKRQEALLPYLSSEEDRKKGKKFARYQFGDLLLHLEKKHGEDWGKVYDEAWERIDKKVEGLSKHIKLEEERRSEDAQSKAALTDWLRAKASFVIEGLKEADKDEFCRCELKLQKWYGDLRGKPFAIEAENSILDISGFSKQYNCAFIWQKDGVKKLNLYLIINYFKGGKLRFKKIKPEAFEANRFYTVINKKSGEIVPMEVNFNFDDPNLIILPLAFGKRQGREFIWNDLLSLETGSLKLANGRVIEKTLYNRRTRQDEPALFVALTFERREVLDSSNIKPMNLIGIDRGENIPAVIALTDPEGCPLSRFKDSLGNPTHILRIGESYKEKQRTIQAAKEVEQRRAGGYSRKYASKAKNLADDMVRNTARDLLYYAVTQDAMLIFENLSRGFGRQGKRTFMAERQYTRMEDWLTAKLAYEGLPSKTYLSKTLAQYTSKTCSNCGFTITSADYDRVLEKLKKTATGWMTTINGKELKVEGQITYYNRYKRQNVVKDLSVELDRLSEESVNNDISSWTKGRSGEALSLLKKRFSHRPVQEKFVCLNCGFETHADEQAALNIARSWLFLRSQEYKKYQTNKTTGNTDKRAFVETWQSFYRKKLKEVWKPAV

SEQ ID NO: 872 - protein, 978 aa, synthetic construct
  REGION 1..978: note = CasX protein variant
MQEIKRFNKIRRRLVKDSNTKKAGKTGPMKTLLVRVMTPDLRERLENLRKKPENIPQPISNTSRANLNKLLTDYTEMKKAILHVYWEEFQKDPVGLMSRVAQPAPKNIDQRKLIPVKDGNERLTSSGFACSQCCQPLYVYKLEQVNDKGKPHTNYFGRCNVSEHERLILLSPHKPEANDELVTYSLGKFGQRALDFYSIHVTRESNHPVKPLEQIGGNSCASGPVGKALSDACMGAVASFLTKYQDIILEHQKVIKKNEKRLANLKDIASANGLAFPKITLPPQPHTKEGIEAYNNVVAQIVIWVNLNLWQKLKIGRDEAKPLQRLKGFPSFPLVERQANEVDWWDMVCNVKKLINEKKEDGKVFWQNLAGYKRQEALLPYLSSEEDRKKGKKFARYQFGDLLLHLEKKHGEDWGKVYDEAWERIDKKVEGLSKHIKLEEERRSEDAQSKAALTDWLRAKASFVIEGLKEADKDEFCRCELKLQKWYGDLRGKPFAIEAENSILDISGFSKQYNCAFIWQKDGVKKLNLYLIINYFKGGKLRFKKIKPEAFEANRFYTVINKKSGEIVPMEVNFNFDDPNLIILPLAFGKRQGREFIWNDLLSLETGSLKLANGRVIEKTLYNRRTRQDEPALFVALTFERREVLDSSNIKPMNLIGIDRGENIPAVIALTDPEGCPLSRFKDSLGNPTHILRIGESYKEKQRTIQAAKEVEQRRAGGYSRKYASKAKNLADDMVRNTARDLLYYAVTQDAMLIFENLSRGFGRQGKRTFMAERQYTRMEDWLTAKLAYEGLPSKTYLSKTLAQYTSKTCSNCGFTITSADYDRVLEKLKKTATGWMTTINGKELKVEGQITYYNRYKRQNVVKDLSVELDRLSEESVNNDISSWTKGRSGEALSLLKKRFSHRPVQEKFVCLNCGFETHADEQAALNIARSWLFLRSQEYKKYQTNKTTGNTDKRAFVETWQSFYRKKLKEVWKPAV

SEQ ID NO: 873 - protein, 978 aa, synthetic construct
  REGION 1..978: note = CasX protein variant
MQEIKRINKIRRRLVKDSNTKKAGKTGPMKTLLVRVMTPDLRERLENLRKKPENIPQPISNTSRANLNKLLTDYTEMKKAILHVYWEEFQKDPVGLMSRVAQPAPKNIDQRKLIPVKDGNERLTSSGFACSQCCQPLYVYKLEQVNDKGKPHTNYFGRCNVSEHERLILLSPHKPEANDELVTYSLGKFGQRALDFYSIHVTRESNHPVKPLEQIGGNSCASGPVGKALSDACMGAVASFLTKYQDIILEHQKVIKKNEKRLANLKDIASANGLAFPKITLPPQPHTKEGIEAYNNVVAQIVIWVNLNLWQKLKIGRDEAKPLQRLKGFPSFPLVERQANEVDWWDMVCNVKKLINEKKEDGKVFWQNLAGYKRQEALLPYLSSEEDRKKGKKFARYQFGDLLLHLEKKHGEDWGKVYDEAWERIDKKVEGLSKHIKLEEERRSEDAQSKAALTDWLRAKASFVIEGLKEADKDEFCRCELKLQKWYGDLRGKPFAIEAENSILDISGFSKQYNCAFIWQKDGVKKLNLYLIINYFKGGKLRFKKIKPEAFEANRFYTVINKKSGEIVPMEVNFNFDDPNLIILPLAFGKRQGREFIWNDLLSLETGSLKLANGRVIEKTLYNRRTRQDEPALFVALTFERREVLDSSNIKPMNLIGIDRGENIPAVIALTDPEGCPLSRFKDSLGNPTHILRIGESYKEKQRTIQAAKEVEQRRAGGYSRKYASKAKNLADDMVRNTARDLLYYAVTQDAMLIFENLSRGFGRQGKRTFMAERQYTRMEDWLTAKLAYEGLPSKTYLSKTLAQYTSKTCSNCGFTITSADYDRVLEKLKKTATGWMTTINGKELKVEGQITYYNRYKRQNVVKDLSVELDRLSEESVNNDISSWTKGRSGEALSLLKKRFSHRPVQEKFVCLNCGFETHADEQAALNIARSWLFLRSQEYKKYKINKTTGNTDKRAFVETWQSFYRKKLKEVWKPAV

SEQ ID NO: 874 - protein, 978 aa, synthetic construct
  REGION 1..978: note = CasX protein variant
MQEIKRINKIRRRLVKDSNTKKAGKTGPMKTLLVRVMTPDLRERLENLRKKPENIPQPISNTSRANLNKLLTDYTEMKKAILHVYWEEFQKDPVGLMSRVAQPAPKNIDQRKLIPVKDGNERLTSSGFACSQCCQPLYVYKLEQVNDKGKPHTNYFGRCNVSEHERLILLSPHKPEANDELVTYSLGKFGQRALDFYSIHVTRESNHPVKPLEQIGGNSCASGPVGKALSDACMGAVASFLTKYQDIILEHQKVIKKNEKRLANLKDIASANGLAFPKITLPPQPHTKEGIEAYNNVVAQIVIWVNLNLWQKLKIGRDEAKPLQRLKGFPSFPLVERQANEVDWWDMVCNVKKLINEKKEDGKVFWQNLAGYKRQEALLPYLSSEEDRKKGKKFARYQFGDLLLHLEKKHGEDWGKVYDEAWERIDKKVEGLSKHIKLEEERRSEDAQSKAALTDWLRAKASFVIEGLKEADKDEFCRCELKLQKWYGDLRGKPFAIEAENSILDISGFSKQYNCAFIWQKDGVKKLNLYLIINYFKGGKLRFKKIKPEAFEANRFYTVINKKSGEIVPMEVNFNFDDPNLIILPLAFGKRQGREFIWNDLLSLETGSLKLANGRVIEKTLYNRRTRQDEPALFVALTFERREVLDSSNIKPMNLIGIDRGENIPAVIALTDPEGCPLSRFEDSLGNPTHILRIGESYKEKQRTIQAAKEVEQRRAGGYSRKYASKAKNLADDMVRNTARDLLYYAVTQDAMLIFENLSRGFGRQGKRTFMAERQYTRMEDWLTAKLAYEGLPSKTYLSKTLAQYTSKTCSNCGFTITSADYDRVLEKLKKTATGWMTTINGKELKVEGQITYYNRYKRQNVVKDLSVELDRLSEESVNNDISSWTKGRSGEALSLLKKRFSHRPVQEKFVCLNCGFETHADEQAALNIARSWLFLRSQEYKKYQTNKTTGNTDKRAFVETWQSFYRKKLKEVWKPAV

SEQ ID NO: 875 - protein, 978 aa, synthetic construct
  REGION 1..978: note = CasX protein variant
MQEIKRINKIRRRLVKDSNTKKAGKTGPMKTLLVRVMTPDLRERLENLRKKPENIPQPISNTSRANLNKLLTDYTEMKKAILHVYWEEFQKDPVGLMSRVAQPAPKNIDQRKLIPVKDGNERLTSSGFACSQCCQPLYVYKLEQVNDKGKPHTNYFGRCNVSEHERLILLSPHKPEANDELVTYSLGKFGQRALDFYSIHVTRESNHPVKPLEQIGGNSCASGPVGKALSDACMGAVASFLTKYQDIILEHQKVIKKNEKRLANLKDIASANGLAFPKITLPPQPHTKEGIEAYNNVVAQIVIWVNLNLWQKLKIGRDEAKPLQRLKGFPSFPLVERQANEVDWWDMVCNVKKLINEKKEDGKVFWQNLAGYKRQEALLPYLSSAEDRKKGKKFARYQFGDLLLHLEKKHGEDWGKVYDEAWERIDKKVEGLSKHIKLEEERRSEDAQSKAALTDWLRAKASFVIEGLKEADKDEFCRCELKLQKWYGDLRGKPFAIEAENSILDISGFSKQYNCAFIWQKDGVKKLNLYLIINYFKGGKLRFKKIKPEAFEANRFYTVINKKSGEIVPMEVNFNFDDPNLIILPLAFGKRQGREFIWNDLLSLETGSLKLANGRVIEKTLYNRRTRQDEPALFVALTFERREVLDSSNIKPMNLIGIDRGENIPAVIALTDPEGCPLSRFKDSLGNPTHILRIGESYKEKQRTIQAAKEVEQRRAGGYSRKYASKAKNLADDMVRNTARDLLYYAVTQDAMLIFENLSRGFGRQGKRTFMAERQYTRMEDWLTAKLAYEGLPSKTYLSKTLAQYTSKTCSNCGFTITSADYDRVLEKLKKTATGWMTTINGKELKVEGQITYYNRYKRQNVVKDLSVELDRLSEESVNNDISSWTKGRSGEALSLLKKRFSHRPVQEKFVCLNCGFETHADEQAALNIARSWLFLRSQEYKKYQTNKTTGNTDKRAFVETWQSFYRKKLKEVWKPAV

SEQ ID NO: 876 - protein, 978 aa, synthetic construct
  REGION 1..978: note = CasX protein variant
MQEIKRINKIRRRLVKDSNTKKAGKTGPMKTLLVRVMTPDLRERLENLRKKPENIPQPISNTSRANLNKLLTDYTEMKKAILHVYWEEFQKDPVGLMSRVAQPAPKNIDQRKLIPVKDGNERLTSSGFACSQCCQPLYVYKLEQVNDKGKPHTNYFGRCNVSEHERLILLSPHKPEANDELVTYSLGKFGQRALDFYSIHVTRESNHPVKPLEQIGGNSCASGPVGKALSDACMGAVASFLTKYQDIILEHQKVIKKNEKRLANLKDIASANGLAFPKITLPPQPHTKEGIEAYNNVVAQIVIWVNLNLWQKLKIGRDEAKPLQRLKGFPSFPLVERQANEVDWWDMVCNVKKLINEKKEDGKVFWQNLAGYKRQEALLPYLSSEEDRKKGKKFARYQFGDLLLHLEKKHGEDWGKVYDEAWERIDKKVEGLSKHIKLEEERRSEDAQSKAALTDWLRAKASFVIEGLKEADKDEFCRCELKLQKWYGDLRGKPFAIEAENSILDISGFSKQYNCAFIWQKDGVKKLNLYLIINYFKGGKLRFKKIKPEAFEANRFYTVINKKSGEIVPMEVNFNFDDPNLIILPLAFGKRQGREFIWNDLLSLETGSLKLANGRVIEKTLYNRRTRQDEPALFVALTFERREVLDSSNIKPMNLIGIDRGENIPAVIALTDPEGCPLSRFKDSLGNPTHILRIGESYKEKQRTIQAAKEVEQRRAGGYSRKYASKAKNLADDMVRNTARDLLYYAVTQDAMLIFENLSRGFGRQGKRTFMAERQYTRMEDWLTAKLAYEGLSSKTYLSKTLAQYTSKTCSNCGFTITSADYDRVLEKLKKTATGWMTTINGKELKVEGQITYYNRYKRQNVVKDLSVELDRLSEESVNNDISSWTKGRSGEALSLLKKRFSHRPVQEKFVCLNCGFETHADEQAALNIARSWLFLRSQEYKKYQTNKTTGNTDKRAFVETWQSFYRKKLKEVWKPAV

SEQ ID NO: 877 - protein, 978 aa, synthetic construct
  REGION 1..978: note = CasX protein variant
MQEIKRINKIRRRLVKDSNTKKAGKTGPMKTLLVRVMTPDLRERLENLRKKPENIPQPISNTSRANLNKLLTDYTEMKKAILHVYWEEFQKDPVGLMSRVAQPAPKNIDQRKLIPVKDGNERLTSSGFACSQCCQPLYVYKLEQVNDKGKPHTNYFGRCNVSEHERLILLSPHKPEANDELVTYSLGKFGQRALDFYSIHVTRESNHPVKPLEQIGGNSCASGPVGKALSDACMGAVASFLTKYQDIILEHQKVIKKNEKRLANLKDIASANGLAFPKITLPPQPHTKEGIEAYNNVVAQIVIWVNLNLWQKLKIGRDEAKPLQRLKGFPSFPLVERQANEVDWWDMVCNVKKLINEKKEDGKVFWQNLAGYKRQEALLPYLSSQEDRKKGKKFARYQFGDLLLHLEKKHGEDWGKVYDEAWERIDKKVEGLSKHIKLEEERRSEDAQSKAALTDWLRAKASFVIEGLKEADKDEFCRCELKLQKWYGDLRGKPFAIEAENSILDISGFSKQYNCAFIWQKDGVKKLNLYLIINYFKGGKLRFKKIKPEAFEANRFYTVINKKSGEIVPMEVNFNFDDPNLIILPLAFGKRQGREFIWNDLLSLETGSLKLANGRVIEKTLYNRRTRQDEPALFVALTFERREVLDSSNIKPMNLIGIDRGENIPAVIALTDPEGCPLSRFKDSLGNPTHILRIGESYKEKQRTIQAAKEVEQRRAGGYSRKYASKAKNLADDMVRNTARDLLYYAVTQDAMLIFENLSRGFGRQGKRTFMAERQYTRMEDWLTAKLAYEGLPSKTYLSKTLAQYTSKTCSNCGFTITSADYDRVLEKLKKTATGWMTTINGKELKVEGQITYYNRYKRQNVVKDLSVELDRLSEESVNNDISSWTKGRSGEALSLLKKRFSHRPVQEKFVCLNCGFETHADEQAALNIARSWLFLRSQEYKKYQTNKTTGNTDKRAFVETWQSFYRKKLKEVWKPAV

SEQ ID NO: 878 - protein, 978 aa, synthetic construct
  REGION 1..978: note = CasX protein variant
MQEIKRINKIRRRLVKDSNTKKAGKTGPMKTLLVRVMTPDLRERLENLRKKPENIPQPISNTSRANLNKLLTDYTEMKKAILHVYWEEFQKDPVGLMSRVAQPAPKNIDQRKLIPVKDGNERLTSSGFACSQCCQPLYVYKLEQVNDKGKPHTNYFGRCNVSEHERLILLSPHKPEANDELVTYSLGKFGQRALDFYSIHVTRESNHPVKPLEQIGGNSCASGPVGKALSDACMGAVASFLTKYQDIILEHQKVIKKNEKRLANLKDIASANGLAFPKITLPPQPHTKEGIEAYNNVVAQIVIWVNLNLWQKLKIGRDEAKPLQRLKGFPSFPLVERQANEVDWWDMVCNVKKLINEKKEDGKVFWQNLAGYKRQEALLPYLSSEEDRKKGKKFARYQFGDLLLHLEKKHGEDWGKVYDEAWERIDKKVEGLSKHIKLEEERRSEDAQSKAALTDWLRAKASFVIEGLKEADKDEFCRCELKLQKWYGDLRGKPFAIEAENSILDISGFSKQYNCAFIWQKDGVKKLNLYLIINYFKGGKLRFKKIKPEAFEANRFYTVINKKSGEIVPMEVNFNFDDPNLIILPLAFGKRQGREFIWNDLLSLETGSLKLANGRVIEKTLYNRRTRQDEPALFVALTFERREVLDSSNIKPMNLIGIDRGENIPAVIALTDPEGCPLSRFKDSLGNPTHILRIGESYKEKQRTIQAAKEVEQRRAGGYSRKYASKAKNLANDMVRNTARDLLYYAVTQDAMLIFENLSRGFGRQGKRTFMAERQYTRMEDWLTAKLAYEGLPSKTYLSKTLAQYTSKTCSNCGFTITSADYDRVLEKLKKTATGWMTTINGKELKVEGQITYYNRYKRQNVVKDLSVELDRLSEESVNNDISSWTKGRSGEALSLLKKRFSHRPVQEKFVCLNCGFETHADEQAALNIARSWLFLRSQEYKKYQTNKTTGNTDKRAFVETWQSFYRKKLKEVWKPAV

SEQ ID NO: 879 - protein, 978 aa, synthetic construct
  REGION 1..978: note = CasX protein variant
MQEIKRINKIRRRLVKDSNTKKAGKTGPMKTLLVRVMTPDLRERLENLRKKPENIPQPISNTSRANLNKLLTDYTEMKKAILHVYWEEFQKDPVGLMSRVAQPAPKNIDQRKLIPVKDGNERLTSSGFACSQCCQPLYVYKLEQVNDKGKPHTNYFGRCNVSEHERLILLSPHKPEANDELVTYSLGKFGQRALDFYSIHVTRESNHPVKPLEQIGGNSCASGPVGKALSDACMGAVASFLTKYQDIILEHQKVIKKNEKRLANLKDIASANGLAFPKITLPPQPHTKEGIKAYNNVVAQIVIWVNLNLWQKLKIGRDEAKPLQRLKGFPSFPLVERQANEVDWWDMVCNVKKLINEKKEDGKVFWQNLAGYKRQEALLPYLSSEEDRKKGKKFARYQFGDLLLHLEKKHGEDWGKVYDEAWERIDKKVEGLSKHIKLEEERRSEDAQSKAALTDWLRAKASFVIEGLKEADKDEFCRCELKLQKWYGDLRGKPFAIEAENSILDISGFSKQYNCAFIWQKDGVKKLNLYLIINYFKGGKLRFKKIKPEAFEANRFYTVINKKSGEIVPMEVNFNFDDPNLIILPLAFGKRQGREFIWNDLLSLETGSLKLANGRVIEKTLYNRRTRQDEPALFVALTFERREVLDSSNIKPMNLIGIDRGENIPAVIALTDPEGCPLSRFKDSLGNPTHILRIGESYKEKQRTIQAAKEVEQRRAGGYSRKYASKAKNLADDMVRNTARDLLYYAVTQDAMLIFENLSRGFGRQGKRTFMAERQYTRMEDWLTAKLAYEGLPSKTYLSKTLAQYTSKTCSNCGFTITSADYDRVLEKLKKTATGWMTTINGKELKVEGQITYYNRYKRQNVVKDLSVELDRLSEESVNNDISSWTKGRSGEALSLLKKRFSHRPVQEKFVCLNCGFETHADEQAALNIARSWLFLRSQEYKKYQTNKTTGNTDKRAFVETWQSFYRKKLKEVWKPAV

SEQ ID NO: 880 - protein, 978 aa, synthetic construct
  REGION 1..978: note = CasX protein variant
MQEIKRINKIRRRLVKDSNTKKAGKTGPMKTLLVRVMTPDLRERLENLRKKPENIPQPISNTSRANLNKLLTDYTEMKKAILHVYWEEFQKDPVGLMSRVAQPAPKNIDQRKLIPVKDGNERLTSSGFACSQCCQPLYVYKLEQVNDKGKPHTNYFGRCNVSEHERLILLSPHKPEANDELVTYSLGKFGQRALDFYSIHVTRESNHPVKPLEQIGGNSCASGPVGKALSDACMGAVASFLTKYQDIILEHQKVIKKNEKRLANLKDIASANGLAFPKITLPPQPHTKEGIEAYNNVVAQIVIWVNLNLWQKLKIGRDEAKPLQRLKGFPSFPLVERQANEVDWWDMVCNVKKLINEKKEDGKVFWQNLAGYKRQEALLPYLSSEEDRKKGKKFARYQFGDLLLHLEKKHGEDWGKVYDEAWERIDKKVEGLSKHIKLEEERRSEDAQSKAALTDWLRAKASFVIEGLKEADKDEFCRCELKLQKWYGDLRGKPFAIEAENSILDISGFSKQYNCAFIWQKDGVKKLNLYLIINYFKGGKLRFKKIKPEAFEANRFYTVINKKSGEIVPMEVNFNFDDPNLIILPLAFGKRQGREFIWNDLLSLETGSLKLANGRVIEKTLYNRRTRQDEPALFVALTFERREVLDSSNIKPMNLIGIDRGENIPAVIALTDPEGCPLSRFKDSLGNPTHILRIGESYKEKQRTIQAAKEVEQRRAGGYSRKYASKAKNLADDMVRNTARDLLYYAVTQDAMLIFENLSRGFGRQGKRTFMAERQYTRMEDWLTAKLAYEGLPRKTLLSKTLAQYTSKTCSNCGFTITSADYDRVLEKLKKTATGWMTTINGKELKVEGQITYYNRYKRQNVVKDLSVELDRLSEESVNNDISSWTKGRSGEALSLLKKRFSHRPVQEKFVCLNCGFETHADEQAALNIARSWLFLRSQEYKKYQTNKTTGNTDKRAFVETWQSFYRKKLKEVWKPAV

SEQ ID NO: 881 - protein, 978 aa, synthetic construct
  REGION 1..978: note = CasX protein variant
MQEIKRINKIRRRLVKDSNTKKAGKTGPMKTLLVRVMTPDLRERLENLRKKPENIPQPISNTSRANLNKLLTDYTEMKKAILHVYWEEFQKDPVGLMSRVAQPAPKNIDQRKLIPVKDGNERLTSSGFACSQCCQPLYVYKLEQVNDKGKPHTNYFGRCNVSEHERLILLSPHKPEANDELVTYSLGKFGQRALDFYSIHVTRESNHPVKPLEQIGGNSCASGPVGKALSDACMGAVASFLTKYQDIILEHQKVIKKNEKRLANLKDIASANGLAFPKITLPPQPHTKEGIEAYNNVVAQIVIWVNLNLWQKLKIGRDEAKPLQRLKGFPSFPLVERQANEVDWWDMVCNVKKLINEKKEDGKVFWQNLAGYKRQEALLPYLSSEEDRKKGKKFARYQFGDLLLHLEKKHGEDWGKVYDEAWERIDKKVEGLSKHIKLEEERRSEDAQSKAALTDWLRAKASFVIEGLKEADKDEFCRCELKLQKWYGDLRGKPFAIEAENSILDISGFSKQYNCAFIWQKDGVKKLNLYLIINYFKGGKLRFKKIKPEAFEANRFYTVINKKSGEIVPMEVNFNFDDPNLIILPLAFGKRQGREFIWNDLLSLETGSLKLANGRVIEKTLYNRRTRQDEPALFVALTFERREVLDSSNIKPMNLIGIDRGENIPAVIALTDPEGCPLSRFKDSLGNPTHILRIGESYKEKQRTIQAAKEVEQRRAGGYSRKYASKAKNLADDMVRNTARDLLYYAVTQDAMLIFENLSRGFGRQGKRTFMAERQYTRMEDWLTAKLAYEMLPSKTYLSKTLAQYTSKTCSNCGFTITSADYDRVLEKLKKTATGWMTTINGKELKVEGQITYYNRYKRQNVVKDLSVELDRLSEESVNNDISSWTKGRSGEALSLLKKRFSHRPVQEKFVCLNCGFETHADEQAALNIARSWLFLRSQEYKKYQTNKTTGNTDKRAFVETWQSFYRKKLKEVWKPAV

SEQ ID NO: 882 - protein, 978 aa, synthetic construct
  REGION 1..978: note = CasX protein variant
MQEIKRINKIRRRLVKDSNTKKAGKTGPMKTLLVRVMTPDLRERLENLRKKPENIPQPISNTSRANLNKLLTDYTEMKKAILHVYWEEFQKDPVGLMSRVAQPAPKNIDQRKLIPVKDGNERLTSSGFACSQCCQPLYVYKLEQVNDKGKPHTNYFGRCNVSEHERLILLSPHKPEANDELVTYSLGKFGQRALDFYSIHVTRESNHPVKPLEQIGGNSCASGPVGKALSDACMGAVASFLTKYQDIILEHQKVIKKNEKRLANLKDIASANGLAFPKITLPPQPHTKEGIEAYNNVVAQIVKWVNLNLWQKLKIGRDEAKPLQRLKGFPSFPLVERQANEVDWWDMVCNVKKLINEKKEDGKVFWQNLAGYKRQEALLPYLSSEEDRKKGKKFARYQFGDLLLHLEKKHGEDWGKVYDEAWERIDKKVEGLSKHIKLEEERRSEDAQSKAALTDWLRAKASFVIEGLKEADKDEFCRCELKLQKWYGDLRGKPFAIEAENSILDISGFSKQYNCAFIWQKDGVKKLNLYLIINYFKGGKLRFKKIKPEAFEANRFYTVINKKSGEIVPMEVNFNFDDPNLIILPLAFGKRQGREFIWNDLLSLETGSLKLANGRVIEKTLYNRRTRQDEPALFVALTFERREVLDSSNIKPMNLIGIDRGENIPAVIALTDPEGCPLSRFKDSLGNPTHILRIGESYKEKQRTIQAAKEVEQRRAGGYSRKYASKAKNLADDMVRNTARDLLYYAVTQDAMLIFENLSRGFGRQGKRTFMAERQYTRMEDWLTAKLAYEGLPSKTYLSKTLAQYTSKTCSNCGFTITSADYDRVLEKLKKTATGWMTTINGKELKVEGQITYYNRYKRQNVVKDLSVELDRLSEESVNNDISSWTKGRSGEALSLLKKRFSHRPVQEKFVCLNCGFETHADEQAALNIARSWLFLRSQEYKKYQTNKTTGNTDKRAFVETWQSFYRKKLKEVWKPAV

SEQ ID NO: 883 - protein, 980 aa, synthetic construct
  REGION 1..980: note = CasX protein variant
MQEIKRINKIRRRLVKDSNTKKAGKTGPMKTLLVRVMTPDLRERLENLRKKPENIPQPISNTSRANLNKLLTDYTEMKKAILHVYWEEFQKDPVGLMSRVAQPAPKNIDQRKLIPVKDGNERLTSSGFACSQCCQPLYVYKLEQVNDKGKPHTNYFGRCNVSEHERLILLSPHKPEANDELVTYSLGKFGQRALDFYSIHVTRESNHPVKPLEQIGGNSCASGPVGKALSDACMGAVASFLTKYQDIILEHQKVIKKNEKRLANLKDIASANGLAFPKITLPPQPHTKEGIEAYNNVVAQIVIWVNLNLWQKLKIGRDEAKPLQRLKGFPSFPLVERQANEVDWWDMVCNVKKLINEKKEDGKVFWQNLAGYKRQEALLPYLSSEEDRKKGKKFARYQFGDLLLHLEKKHGEDWGKVYDEAWERIDKKVEGLSKHIKLEEERRSEDAQSKAALTDWLRAKASFVIEGLKEADKDEFCRCELKLQKWYGDLRGKPFAIEAENSILDISGFSKQYNCAFIWQKDGVKKLNLYLIINYFKGGKLRFKKIKPEAFEANRFYTVINKKSGEIVPMEVNFNFDDPNLIILPLAFGKRQGREFIWNDLLSLETGSLKLANGRVIEKTLYNRRTRQDEPALFVALTFERREVLDSSNIKPMNLIGIDRGENIPAVIALTDPEGCPLSRFKDSLGNPTHILRIGESYKEKQRTIQAAKEVEQRRAGGYSRKYASKAKNLADDMVRNTARDLLYYAVTQDAMLIFENLSRGFGRQGKRTFMAERQYTRMEDWLTAKLAYEGLASPSKTYLSKTLAQYTSKTCSNCGFTITSADYDRVLEKLKKTATGWMTTINGKELKVEGQITYYNRYKRQNVVKDLSVELDRLSEESVNNDISSWTKGRSGEALSLLKKRFSHRPVQEKFVCLNCGFETHADEQAALNIARSWLFLRSQEYKKYQTNKTTGNTDKRAFVETWQSFYRKKLKEVWKPAV

SEQ ID NO: 884 - protein, 978 aa, synthetic construct
  REGION 1..978: note = CasX protein variant
MQEIKRINKIRRRLVKDSNTKKAGKTGPMKTLLVRVMTPDLRERLENLRKKPENIPQPISNTSRANLNKLLTDYTEMKKAILHVYWEEFQKDPVGLMSRVAQPAPKNIDQRKLIPVKDGNERLTSSGFACSQCCQPLYVYKLEQVNDKGKPHTNYFGRCNVSEHERLILLSPHKPEANDELVTYSLGKFGQRALDFYSIHVTRESNHPVKPLEQIGGNSCASGPVGKALSDACMGAVASFLTKYQDIILEHQKVIKKNEKRLANLKDIASANGLAFPKITLPPQPHTKEGIEAYNNVVAQIVIWVNLNLWQKLKIGRDEAKPLQRLKGFPSFPLVERQANEVDWWDMVCNVKKLINEKKEDGKVFWQNLAGYKRQEALLPYLSSEEDRKKGKKFARYQFGDLLLHLEKKHGEDWGKVYDEAWERIDKKVEGLSKHIKLEEERRSEDAQSKAALTDWLRAKASFVIEGLKEADKDEFCRCELKLQKWYGDLRGKPFAIEAENSILDISGFSKQYNCAFIWQKDGVKKLNLYLIINYFKGGKLRFKKIKPEAFEANRFYTVINKKSGEIVPMEVNFNFDDPNLIILPLAFGKRQGREFIWNDLLGLETGSLKLANGRVIEKTLYNRRTRQDEPALFVALTFERREVLDSSNIKPMNLIGIDRGENIPAVIALTDPEGCPLSRFKDSLGNPTHILRIGESYKEKQRTIQAAKEVEQRRAGGYSRKYASKAKNLADDMVRNTARDLLYYAVTQDAMLIFENLSRGFGRQGKRTFMAERQYTRMEDWLTAKLAYEGLPSKTYLSKTLAQYTSKTCSNCGFTITSADYDRVLEKLKKTATGWMTTINGKELKVEGQITYYNRYKRQNVVKDLSVELDRLSEESVNNDISSWTKGRSGEALSLLKKRFSHRPVQEKFVCLNCGFETHADEQAALNIARSWLFLRSQEYKKYQTNKTTGNTDKRAFVETWQSFYRKKLKEVWKPAV

SEQ ID NO: 885 - protein, 978 aa, synthetic construct
  REGION 1..978: note = CasX protein variant
MQEIKRINKIRRRLVKDSNTKKAGKTGPMKTLLVRVMTPDLRERLENLRKKPENIPQPISNTSRANLNKLLTDYTEMKKAILHVYWEEFQKDPVGLMSRVAQPAPKNIDQRKLIPVKDGNERLTSSGFACSQCCQPLYVYKLEQVNDKGKPHTNYFGRCNVSEHERLILLSPHKPEANDELVTYSLGKFGQRALDFYSIHVTRESNHPVKPLEQIGGNSCASGPVGKALSDACMGAVASFLTKYQDIILEHQKVIKKNEKRLANLKDIASANGLAFPKITLPPQPHTKEGIEAYNNVVAQIVIWVNLNLWQKLKIGRDEAKPLQRLKGFPSFPLVERQANEVDWWDMVCNVKKLINEKKEDGKVFWQNLAGYKRQEALLPYLSSEEDRKKGKKFARYQFGDLLLHLEKKHGEDWGKVYDEAWERIDKKVEGLSKHIKLEEERRSEDAQSKAALTDWLRAKASFVIEGLKEADKDEFCRCELKLQKWYGDLRGKPFAIEAENSILDISGFSKQYNCAFIWQKDGVKKLNLYLIINYFKGGKLRFKKIKPEAFEANRFYTVINKKSGEIVPMEVNFNFDDPNLIILPLAFGKRQGREFIWNDLLSLETGSLKLANGRVIEKTLYNRRTRQDEPALFVALTFERREVLDSSNIKPMNLIGIDRGENIPAVIALTDPEGCPLSRFKDSLGNPTHILRIGESYKEKQRTIQAAKEVEQRRAGGYSRKYASKAKNLADDMVRNTARDLLYYAVTQDAMLIFENLSRGFGRQGKRTFMAERQYTRMEDWLTAKLAYEGLPSKTLLSKTLAQYTSKTCSNCGFTITSADYDRVLEKLKKTATGWMTTINGKELKVEGQITYYNRYKRQNVVKDLSVELDRLSEESVNNDISSWTKGRSGEALSLLKKRFSHRPVQEKFVCLNCGFETHADEQAALNIARSWLFLRSQEYKKYQTNKTTGNTDKRAFVETWQSFYRKKLKEVWKPAV

SEQ ID NO: 886 - protein, 978 aa, synthetic construct
  REGION 1..978: note = CasX protein variant
MQEIKRINKIRRRLVKDSNTKKAGKTGPMKTLLVRVMTPDLRERLENLRKKPENIPQPISNTSRANLNKLLTDYTEMKKAILHVYWEEFQKDPVGLMSRVAQPAPKNIDQRKLIPVKDGNERLTSSGFACSQCCQPLYVYKLEQVNDKGKPHTNYFGRCNVSEHERLILLSPHKPEANDELVTYSLGKFGQRALDFYSIHVTRESNHPVKPLEQIGGNSCASGPVGKALSDACMGAVASFLTKYQDIILEHQKVIKKNEKRLANLKDIASANGLAFPKITLPPQPHTKEGIEAYNNVVAQIVIWVNLNLWQKLKIGRDEAKPLQRLKGFPSFPLVERQANEVDWWDMVCNVKKLINEKKEDGKVFWQNLAGYKRQEKLLPYLSSEEDRKKGKKFARYQFGDLLLHLEKKHGEDWGKVYDEAWERIDKKVEGLSKHIKLEEERRSEDAQSKAALTDWLRAKASFVIEGLKEADKDEFCRCELKLQKWYGDLRGKPFAIEAENSILDISGFSKQYNCAFIWQKDGVKKLNLYLIINYFKGGKLRFKKIKPEAFEANRFYTVINKKSGEIVPMEVNFNFDDPNLIILPLAFGKRQGREFIWNDLLSLETGSLKLANGRVIEKTLYNRRTRQDEPALFVALTFERREVLDSSNIKPMNLIGIDRGENIPAVIALTDPEGCPLSRFKDSLGNPTHILRIGESYKEKQRTIQAAKEVEQRRAGGYSRKYASKAKNLADDMVRNTARDLLYYAVTQDAMLIFENLSRGFGRQGKRTFMAERQYTRMEDWLTAKLAYEGLPSKTYLSKTLAQYTSKTCSNCGFTITSADYDRVLEKLKKTATGWMTTINGKELKVEGQITYYNRYKRQNVVKDLSVELDRLSEESVNNDISSWTKGRSGEALSLLKKRFSHRPVQEKFVCLNCGFETHADEQAALNIARSWLFLRSQEYKKYQTNKTTGNTDKRAFVETWQSFYRKKLKEVWKPAV

SEQ ID NO: 887 - protein, 978 aa, synthetic construct
  REGION 1..978: note = CasX protein variant
MQEIKRINKIRRRLVKDSNTKKAGKTGPMKTLLVRVMTPDLRERLENLRKKPENIPQPISNTSRANLNKLLTDYTEMKKAILHVYWEEFQKDPVGLMSRVAQPAPKNIDQRKLIPVKDGNERLTSSGFACSQCCQPLYVYKLEQVNDKGKPHTNYFGRCNVSEHERLILLSPHKPEANDELVTYSLGKFGQRALDFYSIHVTRESNHPVKPLEQIGGNSCASGPVGKALSDACMGAVASFLTKYQDIILEHQKVIKKNEKRLANLKDIASANGLAFPKITLPPQPHTKEGIEAYNNVVAQIVIWVNLNLWQKLKIGRDEAKPLQRLKGFPSFPLVERQANEVDWWDMVCNVKKLINEKKEDGKVFWQNLAGYKRQEALLPYLSSEEDRKKGKKFARYQFGDLLLHLEKKHGEDWGKVYDEAWERIDKKVEGLSKHIKLEEERRSEDAQSKAALTDWLRAKASFVIEGLKEADKDEFCRCELKLQKWYGDLRGKPFAIEAENSILDISGFSKQYNCAFIWQKDGVKKLNLYLIINYFKGGKLRFKKIKPEAFEANRFYTVINKKSGEIVPMEVNFNFDDPNLIILPLAFGKRQGREFIWNDLLSLETGSLKLANGRVIEKTLYNRRTRQDEPALFVALTFERREVLDSSNIKPMNLIGIDRGENIPAVIALTDPEGCPLSRFKDSLGNPTHILRIGESYKEKQRTIQAAKEVEQRRAGGYSRKYASKAKNLADDMVRNTARDLLYYAVTQDAMLIFENLSRGFGRQGKRTFMAERQYTRMEDWLTAKLAYEGLPSKTYLSKTLAQYTSKTCSNCGFTITSADYDRVLEKLKKTATGWMTTINGKELKVEGQITYYNRYKRQNVVKDLSVELDRLSEESVNNDISSWTKGRSGEALSLLKKRFSHRPVQEKFVCLNCGFETHADEQAALNIARSWLFLRSQEYKKYQTNKTTGNTDRRAFVETWQSFYRKKLKEVWKPAV

SEQ ID NO: 888 - protein, 978 aa, synthetic construct
  REGION 1..978: note = CasX protein variant
MQEIKRINKIRRRLVKDSNTKKAGKTGPMKTLLVRVMTPDLRERLENLRKKPENIPQPISNTSRANLNKLLTDYTEMKKAILHVYWEEFQKDPVGLMSRVAQPAPKNIDQRKLIPVKDGNERLTSSGFACSQCCQPLYVYKLEQVNDKGKPHTNYFGRCNVSEHERLILLSPHKPEANDELVTYSLGKFGQRALDFYSIHVTRESNHPVKPLEQIGGNSCASGPVGKALSDACMGAVASFLTKYQDIILEHQKVIKKNEKRLANLKDIASANGLAFPKITLPPQPHTKEGIEAYNNVVAQIVIWVNLNLWQKLKIGRDEAKPLQRLKGFPSFPLVERQANEVDWWDMVCNVKKLINEKKEDGKVFWQNLAGYKRQEALLPYLSSEEDRKKGKKFARYQFGDLLLHLEKKHGEDWGKVYDEAWERIDKKVEGLSKHIKLEEERRSEDAQSKAALTDWLRAKASFVIEGLKEADKDEFCRCELKLQKWYGDLRGKPFAIEAENSILDISGFSKQYNCAFIWQKDGVKKLNLYLIINYFKGGKLRFKKIKPEAFEANRFYTVINKKSGEIVPMEVNFNFDDPNLIILPLAFGKRQGREFIWNDLLSLETGSLKLANGRVIEKTLYNRRTRQDEPALFVALTFERREVLDSSNIKPMNLIGIDRGENIPAVIALTDPEGCPLSRFKDSLGNPTHILRIGESYKEKQRTIQAAKEVEQRRAGGYSRKYASKAKNLADDMVRNTARDLLYYAVTQDAMLIFENLSRGFGRQGKRTFMAERQYTRMEDWLTAKLAYEGLPSKTYLSKTLAQYTSKTCSNCGFTITSADYDRVLEKLKKTATGWMTTINGKELKVEGQITYYNRYKRQNVVKDLSVELDRLSEESVNNDISSWKKGRSGEALSLLKKRFSHRPVQEKFVCLNCGFETHADEQAALNIARSWLFLRSQEYKKYQTNKTTGNTDKRAFVETWQSFYRKKLKEVWKPAV

SEQ ID NO: 889 - protein, 978 aa, synthetic construct
  REGION 1..978: note = CasX protein variant
MQEIKRINKIRRRLVKDSNTKKAGKTGPMKTLLVRVMTPDLRERLENLRKKPENIPQPISNTSRANLNKLLTDYTEMKKAILHVYWEEFQKDPVGLMSRVAQPAPKNIDQRKLIPVKDGNERLTSSGFACSQCCQPLYVYKLEQVNDKGKPHTNYFGRCNVSEHERLILLSPHKPEANDELVTYSLGKFGQRALDFYSIHVTRESNHPVKPLEQIGGNSCASGPVGKALSDACMGAVASFLTKYQDIILEHQKVIKKNEKRLANLKDIASANGLAFPKITLPPQPHTKEGIEAYNNVVAQIVIWVNLNLWQKLKIGRDEAKPLQRLKGFPSFPLVERRKNEVDWWDMVCNVKKLINEKKEDGKVFWQNLAGYKRQEALLPYLSSEEDRKKGKKFARYQFGDLLLHLEKKHGEDWGKVYDEAWERIDKKVEGLSKHIKLEEERRSEDAQSKAALTDWLRAKASFVIEGLKEADKDEFCRCELKLQKWYGDLRGKPFAIEAENSILDISGFSKQYNCAFIWQKDGVKKLNLYLIINYFKGGKLRFKKIKPEAFEANRFYTVINKKSGEIVPMEVNFNFDDPNLIILPLAFGKRQGREFIWNDLLSLETGSLKLANGRVIEKTLYNRRTRQDEPALFVALTFERREVLDSSNIKPMNLIGIDRGENIPAVIALTDPEGCPLSRFKDSLGNPTHILRIGESYKEKQRTIQAAKEVEQRRAGGYSRKYASKAKNLADDMVRNTARDLLYYAVTQDAMLIFENLSRGFGRQGKRTFMAERQYTRMEDWLTAKLAYEGLPSKTYLSKTLAQYTSKTCSNCGFTITSADYDRVLEKLKKTATGWMTTINGKELKVEGQITYYNRYKRQNVVKDLSVELDRLSEESVNNDISSWTKGRSGEALSLLKKRFSHRPVQEKFVCLNCGFETHADEQAALNIARSWLFLRSQEYKKYQTNKTTGNTDKRAFVETWQSFYRKKLKEVWKPAV

SEQ ID NO: 890 - protein, 978 aa, synthetic construct
  REGION 1..978: note = CasX protein variant
MQEIKRINKIRRRLVKDSNTKKAGKTGPMKTLLVRVMTPDLRERLENLRKKPENIPQPISNTSRANLNKLLTDYTEMKKAILHVYWEEFQKDPVGLMSRVAQPAPKNIDQRKLIPVKDGNERLTSSGFACSQCCQPLYVYKLEQVNDKGKPHTNYFGRCNVSEHERLILLSPHKPEANDELVTYSLGKFGQRALDFYSIHVTRESNHPVKPLEQIGGNSCASGPVGKALSDACMGAVASFLTKYQDIILEHQKVIKKNEKRLANLKDIASANGLAFPKITLPQQPHTKEGIEAYNNVVAQIVIWVNLNLWQKLKIGRDEAKPLQRLKGFPSFPLVERQANEVDWWDMVCNVKKLINEKKEDGKVFWQNLAGYKRQEALLPYLSSEEDRKKGKKFARYQFGDLLLHLEKKHGEDWGKVYDEAWERIDKKVEGLSKHIKLEEERRSEDAQSKAALTDWLRAKASFVIEGLKEADKDEFCRCELKLQKWYGDLRGKPFAIEAENSILDISGFSKQYNCAFIWQKDGVKKLNLYLIINYFKGGKLRFKKIKPEAFEANRFYTVINKKSGEIVPMEVNFNFDDPNLIILPLAFGKRQGREFIWNDLLSLETGSLKLANGRVIEKTLYNRRTRQDEPALFVALTFERREVLDSSNIKPMNLIGIDRGENIPAVIALTDPEGCPLSRFKDSLGNPTHILRIGESYKEKQRTIQAAKEVEQRRAGGYSRKYASKAKNLADDMVRNTARDLLYYAVTQDAMLIFENLSRGFGRQGKRTFMAERQYTRMEDWLTAKLAYEGLPSKTYLSKTLAQYTSKTCSNCGFTITSADYDRVLEKLKKTATGWMTTINGKELKVEGQITYYNRYKRQNVVKDLSVELDRLSEESVNNDISSWTKGRSGEALSLLKKRFSHRPVQEKFVCLNCGFETHADEQAALNIARSWLFLRSQEYKKYQTNKTTGNTDKRAFVETWQSFYRKKLKEVWKPAV

SEQ ID NO: 891 - protein, 978 aa, synthetic construct
  REGION 1..978: note = CasX protein variant
MQEIKRINKIRRRLVKDSNTKKAGKTGPMKTLLVRVMTPDLRERLENLRKKPENIPQPISNTSRANLNKLLTDYTEMKKAILHVYWEEFQKDPVGLMSRVAQPAPKNIDQRKLIPVKDGNERLTSSGFACSQCCQPLYVYKLEQVNDKGKPHTNYFGRCNVSEHERLILLSPHKPEANDELVTYSLGKFGQRALDFYSIHVTRESNHPVKPLEQIGGNSCASGPVGKALSDACMGAVASFLTKYQDIILEHQKVIKKNEKRLANLKDIASANGLAFPKITLPPQPHTKEGIEAYNNVVAQIVIWVNLNLWQKLKIGRDEAKPLQRLKGFPSFPLVERQANEVDWWDMVCNVKKLINEKKEDGKVFWQNLAGYKRQEALLPYLSSEEDRKKGKKFARYQFGDLLLHLEKKHGEDWGKVYDEAWERIDKKVEGLSKHIKLEEERRSEDAQSKAALTDWLRAKASFVIEGLKEADKDEFCRCELKLQKWYGDLRGKPFAIEAENSILDISGFSKQYNCAFIWQKDGVKKLNLYLIINYFKGGKLRFKKIKPEAFEANRFYTVINKKSGEIVPMEVNFNFDDPNLIILPLAFGKRQGREFIWNNLLSLETGSLKLANGRVIEKTLYNRRTRQDEPALFVALTFERREVLDSSNIKPMNLIGIDRGENIPAVIALTDPEGCPLSRFKDSLGNPTHILRIGESYKEKQRTIQAAKEVEQRRAGGYSRKYASKAKNLADDMVRNTARDLLYYAVTQDAMLIFENLSRGFGRQGKRTFMAERQYTRMEDWLTAKLAYEGLPSKTYLSKTLAQYTSKTCSNCGFTITSADYDRVLEKLKKTATGWMTTINGKELKVEGQITYYNRYKRQNVVKDLSVELDRLSEESVNNDISSWTKGRSGEALSLLKKRFSHRPVQEKFVCLNCGFETHADEQAALNIARSWLFLRSQEYKKYQTNKTTGNTDKRAFVETWQSFYRKKLKEVWKPAV

SEQ ID NO: 892 - protein, 978 aa, synthetic construct
  REGION 1..978: note = CasX protein variant
MQEIKRINKIRRRLVKDSNTKKAGKTGPMKTLLVRVMTPDLRERLENLRKKPENIPQPISNTSRANLNKLLTDYTEMKKAILHVYWEEFQKDPVGLMSRVAQPAPKNIDQRKLIPVKDGNERLTSSGFACSQCCQPLYVYKLEQVNDKGKPHTNYFGRCNVSEHERLILLSPHKPEANDELVTYSLGKFGQRALDFYSIHVTRESNHPVKPLEQIGGNSCASGPVGKALSDACMGAVASFLTKYQDIILEHQKVIKKNEKRLANLKDIASANGLAFPKITLPPQPHTKEGIEAYNNVVAQIVIWVNLNLWQKLKIGRDEAKPLQRLKGFPSFPLVERQANEVDWWDMVCNVKKLINEKKEDGKVFWQNLAGYKRQEALLPYLSSEEDRKKGKKFARYQFGDLLLHLEKKHGEDWGKVYDEAWERIDKKVEGLSKHIKLEEERRSEDAQSKAALTDWLRAKASFVIEGLKEADKDEFCRCELKLQKWYGDLRGKPFAIEAENSILDISGFSKQYNCAFIWQKDGVKKLNLYLIINYFKGGKLRFKKIKPEAFEANRFYTVINKKSGEIVPMEVNFNFDDPNLIILPLAFGKRQGREFIWNDLLSLETGSLKLANGRVIEKTLYNRRTRQDEPALFVALTFERREVLDSSNIKPMNLIGIDRGENIPAVIALTDPEGCPLSRFKDSLGNPTHILRIGESYKEKQRTIQAAKEVEQRRAGGYSRKYASKAKNLADDMVRNTARDLLYYAVTQDAMLIFENLSRGFGRQGKRTFMAERQYTRMEDWLTAKLAYEGLPSKTYLSKTLAQYTSKTCSNCGFTITSADYDRVLEKLKKTATGWMTTINGKELKVEGQITYYNRYKRQNVVKDLRVELDRLSEESVNNDISSWTKGRSGEALSLLKKRFSHRPVQEKFVCLNCGFETHADEQAALNIARSWLFLRSQEYKKYQTNKTTGNTDKRAFVETWQSFYRKKLKEVWKPAV

SEQ ID NO: 893 - protein, 978 aa, synthetic construct
  REGION 1..978: note = CasX protein variant
MQEIKRINKIRRRLVKDSNTKKAGKTGPMKTLLVRVMTPDLRERLENLRKKPENIPQPISNTSRANLNKLLTDYTEMKKAILHVYWEEFQKDPVGLMSRVAQPAPKNIDQRKLIPVKDGNERLTSSGFACSQCCQPLYVYKLEQVNDKGKPHTNYFGRCNVSEHERLILLSPHKPEANDELVTYSLGKFGQRALDFYSIHVTRESNHPVKPLEQIGGNSCASGPVGKALSDACMGAVASFLTKYQDIILEHQKVIKKNEKRLANLKDIASANGLAFPKITLPPQPHTKEGIEAYNNVVAQIVIWVNLNLWQKLKIGRDEAKPLQRLKGFPSFPLVERQANEVDWWDMVCNVKKLINEKKEDGKVFWQNLAGYKRQEALLPYLSSEEDRKKGKKFARYQFGDLLLHLEKKHGEDWGKVYDEAWERIDKKVEGLSKHIKLEEERRSEDAQSKAALTDWLRAKASFVIHGLKEADKDEFCRCELKLQKWYGDLRGKPFAIEAENSILDISGFSKQYNCAFIWQKDGVKKLNLYLIINYFKGGKLRFKKIKPEAFEANRFYTVINKKSGEIVPMEVNFNFDDPNLIILPLAFGKRQGREFIWNDLLSLETGSLKLANGRVIEKTLYNRRTRQDEPALFVALTFERREVLDSSNIKPMNLIGIDRGENIPAVIALTDPEGCPLSRFKDSLGNPTHILRIGESYKEKQRTIQAAKEVEQRRAGGYSRKYASKAKNLADDMVRNTARDLLYYAVTQDAMLIFENLSRGFGRQGKRTFMAERQYTRMEDWLTAKLAYEGLPSKTYLSKTLAQYTSKTCSNCGFTITSADYDRVLEKLKKTATGWMTTINGKELKVEGQITYYNRYKRQNVVKDLSVELDRLSEESVNNDISSWTKGRSGEALSLLKKRFSHRPVQEKFVCLNCGFETHADEQAALNIARSWLFLRSQEYKKYQTNKTTGNTDKRAFVETWQSFYRKKLKEVWKPAV

SEQ ID NO: 894 - protein, 978 aa, synthetic construct
  REGION 1..978: note = CasX protein variant
MQEIKRINKIRRRLVKDSNTKKAGKTGPMKTLLVRVMTPDLRERLENLRKKPKNIPQPISNTSRANLNKLLTDYTEMKKAILHVYWEEFQKDPVGLMSRVAQPAPKNIDQRKLIPVKDGNERLTSSGFACSQCCQPLYVYKLEQVNDKGKPHTNYFGRCNVSEHERLILLSPHKPEANDELVTYSLGKFGQRALDFYSIHVTRESNHPVKPLEQIGGNSCASGPVGKALSDACMGAVASFLTKYQDIILEHQKVIKKNEKRLANLKDIASANGLAFPKITLPPQPHTKEGIEAYNNVVAQIVIWVNLNLWQKLKIGRDEAKPLQRLKGFPSFPLVERQANEVDWWDMVCNVKKLINEKKEDGKVFWQNLAGYKRQEALLPYLSSEEDRKKGKKFARYQFGDLLLHLEKKHGEDWGKVYDEAWERIDKKVEGLSKHIKLEEERRSEDAQSKAALTDWLRAKASFVIEGLKEADKDEFCRCELKLQKWYGDLRGKPFAIEAENSILDISGFSKQYNCAFIWQKDGVKKLNLYLIINYFKGGKLRFKKIKPEAFEANRFYTVINKKSGEIVPMEVNFNFDDPNLIILPLAFGKRQGREFIWNDLLSLETGSLKLANGRVIEKTLYNRRTRQDEPALFVALTFERREVLDSSNIKPMNLIGIDRGENIPAVIALTDPEGCPLSRFKDSLGNPTHILRIGESYKEKQRTIQAAKEVEQRRAGGYSRKYASKAKNLADDMVRNTARDLLYYAVTQDAMLIFENLSRGFGRQGKRTFMAERQYTRMEDWLTAKLAYEGLPSKTYLSKTLAQYTSKTCSNCGFTITSADYDRVLEKLKKTATGWMTTINGKELKVEGQITYYNRYKRQNVVKDLSVELDRLSEESVNNDISSWTKGRSGEALSLLKKRFSHRPVQEKFVCLNCGFETHADEQAALNIARSWLFLRSQEYKKYQTNKTTGNTDKRAFVETWQSFYRKKLKEVWKPAV

SEQ ID NO: 895 - protein, 978 aa, synthetic construct
  REGION 1..978: note = CasX protein variant
MQEIKRINKIRRRLVKDSNTKKAGKTGPMKTLLVRVMTPDLRERLENLRKKPENIPQPISNTSRANLNKLLTDYTEMKKAILHVYWEEFQKDPVGLMSRVAQPAPKNIDQRKLIPVKDGNERLTSSGFACSQCCQPLYVYKLEQVNDKGKPHTNYFGRCNVSEHERLILLSPHKPEANDELVTYSLGKFGQRALDFYSIHVTRESNHPVKPLEQIGGNSCASGPVGKALSDACMGAVASFLTKYQDIILEHQKVIKKNEKRLANLKDIASANGLAFPKITLPPQPHTKEGIEAYNNVVAQIVIWVNLNLWQKLKIGRDEAKPLQRLKGFPSFPLVERQANEVDWWDMVCNVKKLINEKKEDGKVFWQNLAGYKRQEALLPYLSSEEDRKKGKKFARYQFGDLLLHLEKKHGEDWGKVYDEAWERIDKKVEGLSKHIKLEEERRSEDAQSKAALTDWLRAKASFVIEGLKEADKDEFCRCELKLQKWYGDLRGKPFAIEAENSILDISGFSKQYNCAFIWQKDGVKKLNLYLIINYFKGGKLRFKKIKPEAFEANRFYTVINKKSGEIVPMEVNFNFDDPNLIILPLAFGKRQGREFIWNDLLSLETGSLKLANGRVIEKTLYNRRTRQDEPALFVALTFERREVLDSSNIKPMNLIGIDRGENIPAVIALTDPEGCPLSRFKDSLGNPTHILRIGESYKEKQRTIQAAKEVEQRRAGGYSRKYASKAKNLADDMVRNTARDLLYYAVTQDAMLIFENLSRGFGRQGKRTFMAERQYTRMEDWLTAKLAYEGEPSKTYLSKTLAQYTSKTCSNCGFTITSADYDRVLEKLKKTATGWMTTINGKELKVEGQITYYNRYKRQNVVKDLSVELDRLSEESVNNDISSWTKGRSGEALSLLKKRFSHRPVQEKFVCLNCGFETHADEQAALNIARSWLFLRSQEYKKYQTNKTTGNTDKRAFVETWQSFYRKKLKEVWKPAV

SEQ ID NO: 896 - protein, 978 aa, synthetic construct
  REGION 1..978: note = CasX protein variant
MQEIKRINKIRRRLVKDSNTKKAGKTGPMKTLLVRVMTPDLRERLENLRKKPENIPQPISNTSRANLNKLLTDYTEMKKAILHVYWEEFQKDPVGLMSRVAQPAPKNIDQRKLIPVKDGNERLTSSGFACSQCCQPLYVYKLEQVNDKGKPHTNYFGRCNVSEHERLILLSPHKPEANDELVTYSLGKFGQRALDFYSIHVTRESNHPVKPLEQIGGNSCASGPVGKALSDACMGAVASFLTKYQDIILEHQKVIKKNEKRLANLKDIASANGLAFPKITLPPQPHTKEGIEAYNNVVAQIVIWVNLNLWQKLKIGRDEAKPLQRLKGFPSFPLVERRANEVDWWDMVCNVKKLINEKKEDGKVFWQNLAGYKRQEALLPYLSSEEDRKKGKKFARYQFGDLLLHLEKKHGEDWGKVYDEAWERIDKKVEGLSKHIKLEEERRSEDAQSKAALTDWLRAKASFVIEGLKEADKDEFCRCELKLQKWYGDLRGKPFAIEAENSILDISGFSKQYNCAFIWQKDGVKKLNLYLIINYFKGGKLRFKKIKPEAFEANRFYTVINKKSGEIVPMEVNFNFDDPNLIILPLAFGKRQGREFIWNDLLSLETGSLKLANGRVIEKTLYNRRTRQDEPALFVALTFERREVLDSSNIKPMNLIGIDRGENIPAVIALTDPEGCPLSRFKDSLGNPTHILRIGESYKEKQRTIQAAKEVEQRRAGGYSRKYASKAKNLADDMVRNTARDLLYYAVTQDAMLIFENLSRGFGRQGKRTFMAERQYTRMEDWLTAKLAYEGLPSKTYLSKTLAQYTSKTCSNCGFTITSADYDRVLEKLKKTATGWMTTINGKELKVEGQITYYNRYKRQNVVKDLSVELDRLSEESVNNDISSWTKGRSGEALSLLKKRFSHRPVQEKFVCLNCGFETHADEQAALNIARSWLFLRSQEYKKYQTNKTTGNTDKRAFVETWQSFYRKKLKEVWKPAV

SEQ ID NO: 897 - protein, 978 aa, synthetic construct
  REGION 1..978: note = CasX protein variant
MQEIKRINKIRRRLVKDSNTKKAGKTGPMKTLLVRVMTPDLRERLENLRKKPENIPQPISNTSRANLNKLLTDYTEMKKAILHVYWEEFQKDPVGLMSRVAQPAPKNIDQRKLIPVKDGNERLTSSGFACSQCCQPLYVYKLEQVNDKGKPDTNYFGRCNVSEHERLILLSPHKPEANDELVTYSLGKFGQRALDFYSIHVTRESNHPVKPLEQIGGNSCASGPVGKALSDACMGAVASFLTKYQDIILEHQKVIKKNEKRLANLKDIASANGLAFPKITLPPQPHTKEGIEAYNNVVAQIVIWVNLNLWQKLKIGRDEAKPLQRLKGFPSFPLVERQANEVDWWDMVCNVKKLINEKKEDGKVFWQNLAGYKRQEALLPYLSSEEDRKKGKKFARYQFGDLLLHLEKKHGEDWGKVYDEAWERIDKKVEGLSKHIKLEEERRSEDAQSKAALTDWLRAKASFVIEGLKEADKDEFCRCELKLQKWYGDLRGKPFAIEAENSILDISGFSKQYNCAFIWQKDGVKKLNLYLIINYFKGGKLRFKKIKPEAFEANRFYTVINKKSGEIVPMEVNFNFDDPNLIILPLAFGKRQGREFIWNDLLSLETGSLKLANGRVIEKTLYNRRTRQDEPALFVALTFERREVLDSSNIKPMNLIGIDRGENIPAVIALTDPEGCPLSRFKDSLGNPTHILRIGESYKEKQRTIQAAKEVEQRRAGGYSRKYASKAKNLADDMVRNTARDLLYYAVTQDAMLIFENLSRGFGRQGKRTFMAERQYTRMEDWLTAKLAYEGLPSKTYLSKTLAQYTSKTCSNCGFTITSADYDRVLEKLKKTATGWMTTINGKELKVEGQITYYNRYKRQNVVKDLSVELDRLSEESVNNDISSWTKGRSGEALSLLKKRFSHRPVQEKFVCLNCGFETHADEQAALNIARSWLFLRSQEYKKYQTNKTTGNTDKRAFVETWQSFYRKKLKEVWKPAV

SEQ ID NO: 898 - protein, 978 aa, synthetic construct
  REGION 1..978: note = CasX protein variant
MQEIKRINKIRRRLVKDSNTKKAGKTGPMKTLLVRVMTPDLRERLENLRKKPENIPQPISNTSRANLNKLLTDYTEMKKAILHVYWEEFQKDPVGLMSRVAQPAPKNIDQRKLIPVKDGNERLTSSGFACSQCCQPLYVYKLEQVNDKGKPHTNYFGRCNVSEHERLILLSPHKPEANDELVTYSLGKFGQRALDFYSIHVTRESNHPVKPLEQIGGNSCASGPVGKALSDACMGAVASFLTKYQDIILEHQKGIKKNEKRLANLKDIASANGLAFPKITLPPQPHTKEGIEAYNNVVAQIVIWVNLNLWQKLKIGRDEAKPLQRLKGFPSFPLVERQANEVDWWDMVCNVKKLINEKKEDGKVFWQNLAGYKRQEALLPYLSSEEDRKKGKKFARYQFGDLLLHLEKKHGEDWGKVYDEAWERIDKKVEGLSKHIKLEEERRSEDAQSKAALTDWLRAKASFVIEGLKEADKDEFCRCELKLQKWYGDLRGKPFAIEAENSILDISGFSKQYNCAFIWQKDGVKKLNLYLIINYFKGGKLRFKKIKPEAFEANRFYTVINKKSGEIVPMEVNFNFDDPNLIILPLAFGKRQGREFIWNDLLSLETGSLKLANGRVIEKTLYNRRTRQDEPALFVALTFERREVLDSSNIKPMNLIGIDRGENIPAVIALTDPEGCPLSRFKDSLGNPTHILRIGESYKEKQRTIQAAKEVEQRRAGGYSRKYASKAKNLADDMVRNTARDLLYYAVTQDAMLIFENLSRGFGRQGKRTFMAERQYTRMEDWLTAKLAYEGLPSKTYLSKTLAQYTSKTCSNCGFTITSADYDRVLEKLKKTATGWMTTINGKELKVEGQITYYNRYKRQNVVKDLSVELDRLSEESVNNDISSWTKGRSGEALSLLKKRFSHRPVQEKFVCLNCGFETHADEQAALNIARSWLFLRSQEYKKYQTNKTTGNTDKRAFVETWQSFYRKKLKEVWKPAV

SEQ ID NO: 899 - protein, 978 aa, synthetic construct
  REGION 1..978: note = CasX protein variant
MQEIKRINKIRRRLVKDSNTKKAGKTGPMKTLLVRVMTPDLRERLENLRKKPENIPQPISNTSRANLNKLLTDYTEMKKAILHVYWEEFQKDPVGLMSRVAQPAPKNIDQRKLIPVKDGNERLTSSGFACSQCCQPLYVYKLEQVNDKGKPHTNYFGRCNVSEHERLILLSPHKPEANDELVTYSLGKFGQRALDFYSIHVTRESNHPVKPLEQIGGNSCASGPVGKALSDACMGAVASFLTKYQDIILEHQKVIKKNEKRLANLKDIASANGLAFPKITLPPQPHTKEGIEAYNNVVAQIVIWVNLNLWQKLKIGRDEAKPLQRLKGFPSFPLVERQANEVDWWDMVCNVKKLINEKKEDGKVFWQNLAGYKRQEALLPYLSSEEDRKKGKKFARYQFGDLLLHLEKKHGEDWGKVYDEAWERIDKKVEGLSKHIKLEEERRSEDAQSKAALTDWLRAKASFVIEGLKEADKDEFCRCELKLQKWYGDLRGKPFAIEAENSILDISGFSKQYNCAFIWQKDGVKKLNLYLIINYFKGGKLRFKKIKPEAFEANRFYTVINKKSGEIVPMEVNFNFDDPNLIILPLAFGKRQGREFIWNDLLSLETGSLKLANGRVIEKTLYNRRTRQDEPALFVALTFERREVLDSSNIKPMNLIGIDRGENIPAVIALTDPEGCPLSRFKDSLGNPTHILRIGESYKEKQRTIQAAKEVEQRRAGGYSRKYASKAKNLADDMVRNTARDLLYYAVTQDAMLIFENLSRGFGRQGKRTFMAERQYTRMEDWLTAKLAYEGLPSKTYLSKTLAQYTSKTCSNCGFTITSADYDRVLEKLKKTATGWMTTINGKELKVEGQITYYNRYKRQNVVKDLSVELDRLSEESVNNDISSWTKGRSGEALSLLKKRFSHRPVQEKFVCLNCGFETHADEQAALNIARSWLFLRSQEYKKYQTNKPPGNTDKRAFVETWQSFYRKKLKEVWKPAV

SEQ ID NO: 900 - protein, 978 aa, synthetic construct
  REGION 1..978: note = CasX protein variant
MQEIKRINKIRRRLVKDSNTKKAGKTGPMKTLLVRVMTPDLRERLENLRKKPENIPQPISNTSRANLNKLLTDYTEMKKAILHVYWEEFQKDPVGLMSRVAQPAPKNIDQRKLIPVKDGNERLTSSGFACSQCCQPLYVYKLEQVNDKGKPHTNYFGRCNVSEHERLILLSPHKPEANDELVTYSLGKFGQRALDFYSIHVTRESNHPVKPLEQIGGNSCASGPVGKALSDACMGAVASFLTKYQDIILEHQKVIKKNEKRLANLKDIASANGLAFPKFTLPPQPHTKEGIEAYNNVVAQIVIWVNLNLWQKLKIGRDEAKPLQRLKGFPSFPLVERQANEVDWWDMVCNVKKLINEKKEDGKVFWQNLAGYKRQEALLPYLSSEEDRKKGKKFARYQFGDLLLHLEKKHGEDWGKVYDEAWERIDKKVEGLSKHIKLEEERRSEDAQSKAALTDWLRAKASFVIEGLKEADKDEFCRCELKLQKWYGDLRGKPFAIEAENSILDISGFSKQYNCAFIWQKDGVKKLNLYLIINYFKGGKLRFKKIKPEAFEANRFYTVINKKSGEIVPMEVNFNFDDPNLIILPLAFGKRQGREFIWNDLLSLETGSLKLANGRVIEKTLYNRRTRQDEPALFVALTFERREVLDSSNIKPMNLIGIDRGENIPAVIALTDPEGCPLSRFKDSLGNPTHILRIGESYKEKQRTIQAAKEVEQRRAGGYSRKYASKAKNLADDMVRNTARDLLYYAVTQDAMLIFENLSRGFGRQGKRTFMAERQYTRMEDWLTAKLAYEGLPSKTYLSKTLAQYTSKTCSNCGFTITSADYDRVLEKLKKTATGWMTTINGKELKVEGQITYYNRYKRQNVVKDLSVELDRLSEESVNNDISSWTKGRSGEALSLLKKRFSHRPVQEKFVCLNCGFETHADEQAALNIARSWLFLRSQEYKKYQTNKTTGNTDKRAFVETWQSFYRKKLKEVWKPAV

SEQ ID NO: 901 - protein, 978 aa, synthetic construct
  REGION 1..978: note = CasX protein variant
MQEIKRINKIRRRLVKDSNTKKAGKTGPMKTLLVRVMTPDLRERLENLRKKPENIPQPISNTSRANLNKLLTDYTEMKKAILHVYWEEFQKDPVGLMSRVAQPAPKNIDQRKLIPVKDGNERLTSSGFACSQCCQPLYVYKLEQVNDKGKPHTNYFGRCNVSEHERLILLSPHKPEANDELVTYSLGKFGQRALDFYSIHVTRESNHPVKPLEQIGGNSCASGPVGKALSDACMGAVASFLTKYQDIILEHQKVIKKNEKRLANLKDIASANGLAFPKITLPPQPHTKEGIEAYNNVVAQIVIWVNLNLWQKLKIGRDEAKPLQRLKGFPSFPLVERQANEVDWWDMVCNVKKLINEKKEDGKVFWQNLAGYKRQEALLPYLSSEEDRKKGKKFARYQFGDLLLHLEKKHGEDWGKVYDEAWERIDKKVEGLSKHIKLEEERRSEDAQSKAALTDWLRAKASFVIEGLKEADKDEFCRCELKLQKWYGDLRGKPFAIEAENSILDISGFSKQYNCAFIWQKDGVKKLNLYLIINYFKGGKLRFKKIKPEAFEANRFYTVINKKSGEIVPMEVNFNFDDPNLIILPLAFGKRQGREFIWNDLLSLETGSLKLANGRVIEKTLYNRRTRQDEPALFVALTFERREVLDSSNIKPMNLIGIDRGENIPAVIALTDPEGCPLSRFKDSLGNPTHILRIGESYKEKQRTIQAAKEVEQRRAGGYSRKYASKAKNLADDMVRNTARDLLYYAVTQDAMLIFENLSRGFGRQGKRTFMAERQYTRMEDWLTAKLAYEGLPSKTYLSKTLAQYTSKTCSNCGFTITSADYDRVLEKLKKTATGWMTTINGKELKVEGQITYYNRYKRQNVVKDLSVELDRLSEESVNNDISSWTKGRSGEALSLMKKRFSHRPVQEKFVCLNCGFETHADEQAALNIARSWLFLRSQEYKKYQTNKTTGNTDKRAFVETWQSFYRKKLKEVWKPAV

SEQ ID NO: 902 - protein, 978 aa, synthetic construct
  REGION 1..978: note = CasX protein variant
MQEIKRINKIRRRLVKDSNTKKAGKTGPMKTLLVRVMTPDLRERLENLRKKPENIPQPISNTSRANLNKLLTDYTEMKKAILHVYWEEFQKDPVGLMSRVAQPAPKNIDQRKLIPVKDGNERLTSSGFACSQCCQPLYVYKLEQVNDKGKPHTNYFGRCNVSEHERLILLSPHKPEANDELVTYSLGKFGQRALDFYSIHVTRESNHPVKPLEQIGGNSCASGPVGKALSDACMGAVASFLTKYQDIILEHQKVIKKNEKRLANLKDIASANGLAFPKITLPPQPHTKEGIEAYNNVVAQIVIWVNLNLWQKLKIGRDEAKPLQRLKGFPSFPLVERQANEVDWWDMVCNVKKLINEKKEDGKVFWQNLAGYKRQEALLPYLSSEEDRKRGKKFARYQFGDLLLHLEKKHGEDWGKVYDEAWERIDKKVEGLSKHIKLEEERRSEDAQSKAALTDWLRAKASFVIEGLKEADKDEFCRCELKLQKWYGDLRGKPFAIEAENSILDISGFSKQYNCAFIWQKDGVKKLNLYLIINYFKGGKLRFKKIKPEAFEANRFYTVINKKSGEIVPMEVNFNFDDPNLIILPLAFGKRQGREFIWNDLLSLETGSLKLANGRVIEKTLYNRRTRQDEPALFVALTFERREVLDSSNIKPMNLIGIDRGENIPAVIALTDPEGCPLSRFKDSLGNPTHILRIGESYKEKQRTIQAAKEVEQRRAGGYSRKYASKAKNLADDMVRNTARDLLYYAVTQDAMLIFENLSRGFGRQGKRTFMAERQYTRMEDWLTAKLAYEGLPSKTYLSKTLAQYTSKTCSNCGFTITSADYDRVLEKLKKTATGWMTTINGKELKVEGQITYYNRYKRQNVVKDLSVELDRLSEESVNNDISSWTKGRSGEALSLLKKRFSHRPVQEKFVCLNCGFETHADEQAALNIARSWLFLRSQEYKKYQTNKTTGNTDKRAFVETWQSFYRKKLKEVWKPAV

SEQ ID NO: 903 - protein, 978 aa, synthetic construct; identical to SEQ ID NO: 902
  REGION 1..978: note = CasX protein variant

SEQ ID NO: 904 - protein, 978 aa, synthetic construct
  REGION 1..978: note = CasX protein variant
MQEIKRINKIRRRLVKDSNTKKAGKTGPMKTLLVRVMTPDLRERLENLRKKPENIPQPISNTSRANLNKLLTDYTEMKKAILHVYWEEFQKDPVGLMSRVAQPAPKNIDQRKLIPVKDGNERLTSSGFACSQCCQPLYVYKLEQVNDKGKPHTNYFGRCNVSEHERLILLSPHKPEANDELVTYSLGKFGQRALDFYSIHVTRESNHPVKPLEQIGGNSCASGPVGKALSDACMGAVASFLTKYQDIILEHQKVIKKNEKRLANLKDIASANGLAFPKITLPPQPHTKEGIEAYNNVVAQIVIWVNLNLWQKLKIGRDEAKPLQRLKGFPSFPLVERQANEVDWWDMVCNVKKLINEKKEDGKVFWQNLAGYKRQEALLPYLSSEEDRKKGKKFARYQFGDLLLHLEKKHGEDWGKVYDEAWERIDKKVEGLSKHIKLEEERRSEDAQSKAALTDWLRAKASFVIEGLKEADKDEFCRCELKLQKWYGDLRGKPFAIEAENSILDISGFSKQYNCAFIWQKDGVKKLNLYLIINYFKGGKLRFKKIKPEAFEANRFYTVINKKSGEIVPMEVNFNFDDPNLIILPLAFGKRQGREFIWNDLLSLETGSLKLANGRVIEKTLYNRRTRQDEPALFVALTFERREVLDSSNIKPMNLIGIDRGENIPAVIALTDPEGCPLSRFKDSLGNPTHILRIGESYKEKQRTIQAAKEVEQRRAGGYSRKYASKAKNLADDMVRNTARDLLYYAVTQDAMLIFENLSRGFGRQGKRTFMAERQYTRMEDWLTAKLAYEGGPSKTYLSKTLAQYTSKTCSNCGFTITSADYDRVLEKLKKTATGWMTTINGKELKVEGQITYYNRYKRQNVVKDLSVELDRLSEESVNNDISSWTKGRSGEALSLLKKRFSHRPVQEKFVCLNCGFETHADEQAALNIARSWLFLRSQEYKKYQTNKTTGNTDKRAFVETWQSFYRKKLKEVWKPAV

SEQ ID NO: 905 - protein, 978 aa, synthetic construct; identical to SEQ ID NO: 845
  REGION 1..978: note = CasX protein variant

SEQ ID NO: 906 - protein, 978 aa, synthetic construct
  REGION 1..978: note = CasX protein variant
MQEIKRINKIRRRLVKDSNTKKAGKTGPMKTLLVRVMTPDLRERLENLRKKPENIPQPISNTSRANLNKLLTDYTEMKKAILHVYWEEFQKDPVGLMSRVAQPAPKNIDQRKLIPVKDGNERLTSSGFACSQCCQPLYVYKLEQVNDKGKPHTNYFGRCNVSEHERLILLSPHKPEANDELVTYSLGKFGQRALDFYSIHVTRESNHPVKPLEQIGGNSCASGPVGKALSDACMGAVASFLTKYQDIILEHQKVIKKNEKRLANLKDIASANGLAFPKITLPPQPHTKEGIEAYNNVVAQIVIWVNLNLWQKLKIGRDEAKPLQRLKGFPSFPLVERQANEVDWWDMVCNVKKLINEKKEDGKVFWQNLAGYKRQEALLPYLSSEEDRKKGKKFARYQFGDLLLHLEKKHGEDWGKVYDEAWERIDKKVEGLSKHIKLEEERRSEDAQSKAALTDWLRAKASFVIEGLKEADKDEFCRCELKLQKWYGDLRGKPFAIEAENSILDISGFSKQYNCAFIWQKDGVKKLNLYLIINYFKGGKLRFKKIKPEAFEANRFYTVINKKSGEIVPMEVNFNFDDPNLIILPLAFGKRQGREFIWNDLLSLETGSLKLANGRVIEKTLYNGRTRQDEPALFVALTFERREVLDSSNIKPMNLIGIDRGENIPAVIALTDPEGCPLSRFKDSLGNPTHILRIGESYKEKQRTIQAAKEVEQRRAGGYSRKYASKAKNLADDMVRNTARDLLYYAVTQDAMLIFENLSRGFGRQGKRTFMAERQYTRMEDWLTAKLAYEGLPSKTYLSKTLAQYTSKTCSNCGFTITSADYDRVLEKLKKTATGWMTTINGKELKVEGQITYYNRYKRQNVVKDLSVELDRLSEESVNNDISSWTKGRSGEALSLLKKRFSHRPVQEKFVCLNCGFETHADEQAALNIARSWLFLRSQEYKKYQTNKTTGNTDKRAFVETWQSFYRKKLKEVWKPAV

SEQ ID NO: 907 - protein, 978 aa, synthetic construct
  REGION 1..978: note = CasX protein variant
MQEIKRINKIRRRLVKDSNTKKAGKTGPMKTLLVRVMTPDLRERLENLRKKPENIPQPISNTSRANLNKLLTDYTEMKKAILHVYWEEFQKDPVGLMSRVAQPAPKNIDQRKLIPVKDGNERLTSSGFACSQCCQPLYVYKLEQVNDKGKPHTNYFGRCNVSEHERLILLSPHKPEANDELVTYSLGKFGQRALDFYSIHVTRESNHPVKPLEQIGGNSCASGPVGKALSDACMGAVASFLTKYQDIILEHQKVIKKNEKRLANLKDIASANGLAFPKITLPPQPHTKEGIEAYNNVVAQIVIWVNLNLWQKLKIGRDEAKPLQRLKGFPSFPLVERQANEVDWWDMVENVKKLINEKKEDGKVFWQNLAGYKRQEALLPYLSSEEDRKKGKKFARYQFGDLLLHLEKKHGEDWGKVYDEAWERIDKKVEGLSKHIKLEEERRSEDAQSKAALTDWLRAKASFVIEGLKEADKDEFCRCELKLQKWYGDLRGKPFAIEAENSILDISGFSKQYNCAFIWQKDGVKKLNLYLIINYFKGGKLRFKKIKPEAFEANRFYTVINKKSGEIVPMEVNFNFDDPNLIILPLAFGKRQGREFIWNDLLSLETGSLKLANGRVIEKTLYNRRTRQDEPALFVALTFERREVLDSSNIKPMNLIGIDRGENIPAVIALTDPEGCPLSRFKDSLGNPTHILRIGESYKEKQRTIQAAKEVEQRRAGGYSRKYASKAKNLADDMVRNTARDLLYYAVTQDAMLIFENLSRGFGRQGKRTFMAERQYTRMEDWLTAKLAYEGLPSKTYLSKTLAQYTSKTCSNCGFTITSADYDRVLEKLKKTATGWMTTINGKELKVEGQITYYNRYKRQNVVKDLSVELDRLSEESVNNDISSWTKGRSGEALSLLKKRFSHRPVQEKFVCLNCGFETHADEQAALNIARSWLFLRSQEYKKYQTNKTTGNTDKRAFVETWQSFYRKKLKEVWKPAV

SEQ ID NO: 908 - protein, 978 aa, synthetic construct
  REGION 1..978: note = CasX protein variant
MQEIKRINKIRRRLVKDSNTKKAGKTGPMKTLLVRVMTPDLRERLENLRKKPENIPQPISNTSRANLNKLLTDYTEMKKAILHVYWEEFQKDPVGLMSRVAQPAPKNIDQRKLIPVKDGNERLTSSGFACSQCCQPLYVYKLEQVNDKGKPHTNYFGRCNVSEHERLILLSPHKPEANDELVTYSLGKFGQRALDFYSIHVTRESNHPVKPLEQIGGNSCASGPVGKALSDACMGAVASFLTKYQDIILEHQKVIKKNEKRLANLKDIASANGLAFPKITLPPQPHTKEGIEAYNNVVAQIVIWVNLNLWQKLKIGRDEAKPLQRLKGFPSFPLVERQANEVDWWDMVCNVKKLINEKKEDGKVFWQNLAGYKRQEALLPYLSSEEDRKKGKKFARYQFGDLLLHLEKKHGEDWGKVYDEAWERIDKKVEGLSKHIKLEEERRSEDAQSKAALTDWLRAKASFVIEGLKEADKDEFCRCELKLQKWYGDLRGKPFAIKAENSILDISGFSKQYNCAFIWQKDGVKKLNLYLIINYFKGGKLRFKKIKPEAFEANRFYTVINKKSGEIVPMEVNFNFDDPNLIILPLAFGKRQGREFIWNDLLSLETGSLKLANGRVIEKTLYNRRTRQDEPALFVALTFERREVLDSSNIKPMNLIGIDRGENIPAVIALTDPEGCPLSRFKDSLGNPTHILRIGESYKEKQRTIQAAKEVEQRRAGGYSRKYASKAKNLADDMVRNTARDLLYYAVTQDAMLIFENLSRGFGRQGKRTFMAERQYTRMEDWLTAKLAYEGLPSKTYLSKTLAQYTSKTCSNCGFTITSADYDRVLEKLKKTATGWMTTINGKELKVEGQITYYNRYKRQNVVKDLSVELDRLSEESVNNDISSWTKGRSGEALSLLKKRFSHRPVQEKFVCLNCGFETHADEQAALNIARSWLFLRSQEYKKYQTNKTTGNTDKRAFVETWQSFYRKKLKEVWKPAV

SEQ ID NO: 909 - protein, 978 aa, synthetic construct
  REGION 1..978: note = CasX protein variant
MQEIKRINKIRRRLVKDSNTKKAGKTGPMKTLLVRVMTPDLRERLENLRKKPENIPQPISNTSRANLNKLLTDYTEMKKAILHVYWEEFQKDPVGLMSRVAQPAPKNIDQRKLIPVKDGNERLTSSGFACSQCCQPLYVYKLEQVNDKGKPHTNYFGRCNVSEHERLILLSPHKPEANDELVTYSLGKFGQRALDFYSIHVTRESNHPVKPLEQIGGNSCASGPVGKALSDACMGAVASFLTKYQDIILEHQKVIKKNEKRLANLKDIASANGLAFPKITLPPQPHTKEGIEAYNNVVAQIVIWVNLNLWQKLKIGRDEAKPLQRLKGFPSFPLVERQANEVDWWDMVCNVKKLINEKKEDGKVFWQNLAGYKRQEALLPYLSSEEDQKKGKKFARYQFGDLLLHLEKKHGEDWGKVYDEAWERIDKKVEGLSKHIKLEEERRSEDAQSKAALTDWLRAKASFVIEGLKEADKDEFCRCELKLQKWYGDLRGKPFAIEAENSILDISGFSKQYNCAFIWQKDGVKKLNLYLIINYFKGGKLRFKKIKPEAFEANRFYTVINKKSGEIVPMEVNFNFDDPNLIILPLAFGKRQGREFIWNDLLSLETGSLKLANGRVIEKTLYNRRTRQDEPALFVALTFERREVLDSSNIKPMNLIGIDRGENIPAVIALTDPEGCPLSRFKDSLGNPTHILRIGESYKEKQRTIQAAKEVEQRRAGGYSRKYASKAKNLADDMVRNTARDLLYYAVTQDAMLIFENLSRGFGRQGKRTFMAERQYTRMEDWLTAKLAYEGLPSKTYLSKTLAQYTSKTCSNCGFTITSADYDRVLEKLKKTATGWMTTINGKELKVEGQITYYNRYKRQNVVKDLSVELDRLSEESVNNDISSWTKGRSGEALSLLKKRFSHRPVQEKFVCLNCGFETHADEQAALNIARSWLFLRSQEYKKYQTNKTTGNTDKRAFVETWQSFYRKKLKEVWKPAV

SEQ ID NO: 910 - protein, 978 aa, synthetic construct
  REGION 1..978: note = CasX protein variant
MQEIKRINKIRRRLVKDSNTKKAGKTGPMKTLLVRVMTPDLRERLENLRKKPENFPQPISNTSRANLNKLLTDYTEMKKAILHVYWEEFQKDPVGLMSRVAQPAPKNIDQRKLIPVKDGNERLTSSGFACSQCCQPLYVYKLEQVNDKGKPHTNYFGRCNVSEHERLILLSPHKPEANDELVTYSLGKFGQRALDFYSIHVTRESNHPVKPLEQIGGNSCASGPVGKALSDACMGAVASFLTKYQDIILEHQKVIKKNEKRLANLKDIASANGLAFPKITLPPQPHTKEGIEAYNNVVAQIVIWVNLNLWQKLKIGRDEAKPLQRLKGFPSFPLVERQANEVDWWDMVCNVKKLINEKKEDGKVFWQNLAGYKRQEALLPYLSSEEDRKKGKKFARYQFGDLLLHLEKKHGEDWGKVYDEAWERIDKKVEGLSKHIKLEEERRSEDAQSKAALTDWLRAKASFVIEGLKEADKDEFCRCELKLQKWYGDLRGKPFAIEAENSILDISGFSKQYNCAFIWQKDGVKKLNLYLIINYFKGGKLRFKKIKPEAFEANRFYTVINKKSGEIVPMEVNFNFDDPNLIILPLAFGKRQGREFIWNDLLSLETGSLKLANGRVIEKTLYNRRTRQDEPALFVALTFERREVLDSSNIKPMNLIGIDRGENIPAVIALTDPEGCPLSRFKDSLGNPTHILRIGESYKEKQRTIQAAKEVEQRRAGGYSRKYASKAKNLADDMVRNTARDLLYYAVTQDAMLIFENLSRGFGRQGKRTFMAERQYTRMEDWLTAKLAYEGLPSKTYLSKTLAQYTSKTCSNCGFTITSADYDRVLEKLKKTATGWMTTINGKELKVEGQITYYNRYKRQNVVKDLSVELDRLSEESVNNDISSWTKGRSGEALSLLKKRFSHRPVQEKFVCLNCGFETHADEQAALNIARSWLFLRSQEYKKYQTNKTTGNTDKRAFVETWQSFYRKKLKEVWKPAV

SEQ ID NO: 911 - protein, 978 aa, synthetic construct
  REGION 1..978: note = CasX protein variant
MQEIKRINKIRRRLVKDSNTKKAGKTGPMKTLLVRVMTPDLRERLENLRKKPENIPQPISNTSRANLNKLLTDYTEMKKAILHVYWEEFQKDPVGLMSRVAQPAPKNIDQRKLIPVKDGNERLTSSGFACSQCCQPLYVYKLEQVNDKGKPHTNYFGRCNVSEHERLILLSPHKPEANDELVTYSLGKFGQRALDFYSIHVTRESNHPVKPLEQIGGNSCASGPVGKALSDACMGAVASFLTKYQDIILEHQKVIKKNEKRLANLKDIASANGLAFPKITLPPQPHTKEGIEAYNNVVAQIVIWVNLNLWQKLKIGRDEAKPLQRLKGFPSFPLVERQANEVDWWDMVCNVKKLINEKKEDGKVFWQNLAGYKRQEALLPYLSSEEDRKKGKKFARYQFGDLLLHLEKKHGEDWGKVYDEAWERIDKKVEGLSKHIKLEEERRSEDAQSKAALTDWLRAKASFVIEGLKEADKDEFCRCELKLQKWYGDLRGKPFAIEAENSILDISGFSKQYNCAFIWQKDGVKKLNLYLIINYFKGGKLRFKKIKPEAFEANRFYTVINKKSGEIVPMEVNFNFDDPNLIILPLAFGKRQGREFIWNDLLSLETGSLKLANGRVIEKTLYNRRTRQDEPALFVALTFERREVLDSSNIKPMNLIGIDRGENIPAVIALTDPEGCPLSRFKDSLGNPTHILRIGESYKEKQRTIQAAKEVQQRRAGGYSRKYASKAKNLADDMVRNTARDLLYYAVTQDAMLIFENLSRGFGRQGKRTFMAERQYTRMEDWLTAKLAYEGLPSKTYLSKTLAQYTSKTCSNCGFTITSADYDRVLEKLKKTATGWMTTINGKELKVEGQITYYNRYKRQNVVKDLSVELDRLSEESVNNDISSWTKGRSGEALSLLKKRFSHRPVQEKFVCLNCGFETHADEQAALNIARSWLFLRSQEYKKYQTNKTTGNTDKRAFVETWQSFYRKKLKEVWKPAV

SEQ ID NO: 912 - protein, 978 aa, synthetic construct
  REGION 1..978: note = CasX protein variant
MQEIKRINKIRRRLVKDSNTKKAGKTGPMKTLLVRVMTPDLRERLENLRKKPENIPQPISNTSRANLNKLLTDYTEMKKAILHVYWEEFQKDPVGLMSRVAQPAPKNIDQRKLIPVKDGNERLTSSGFACSQCCQPLYVYKLEQVNDKGKPHTNYFGRCNVSEHERLILLSPHKPEANDELVTYSLGKFGQRALDFYSIHVTRESNHPVKPLEQIGGNSCASGPVGKALSDACMGAVASFLTKYQDIILEHQKVIKKNEKRLANLKDIASANGLAFPKITLPPQPHTKEGIEAYNNVVAQIVIWVNLNLWQKLKIGRDEAKPLQRLKGFPSFPLVERQANEVDWWDMVCNVKKLINEKKEDGKVFWQNLAGYKRQEALLPYLSSEEDRKKGKKFARYQFGDLLLHLEKKHGEDWGKVYDEAWERIDKKVEGLSKHIKLEEERRSEDAQSKAALTDWLRAKASFVIEGLKEADKDKFCRCELKLQKWYGDLRGKPFAIEAENSILDISGFSKQYNCAFIWQKDGVKKLNLYLIINYFKGGKLRFKKIKPEAFEANRFYTVINKKSGEIVPMEVNFNFDDPNLIILPLAFGKRQGREFIWNDLLSLETGSLKLANGRVIEKTLYNRRTRQDEPALFVALTFERREVLDSSNIKPMNLIGIDRGENIPAVIALTDPEGCPLSRFKDSLGNPTHILRIGESYKEKQRTIQAAKEVEQRRAGGYSRKYASKAKNLADDMVRNTARDLLYYAVTQDAMLIFENLSRGFGRQGKRTFMAERQYTRMEDWLTAKLAYEGLPSKTYLSKTLAQYTSKTCSNCGFTITSADYDRVLEKLKKTATGWMTTINGKELKVEGQITYYNRYKRQNVVKDLSVELDRLSEESVNNDISSWTKGRSGEALSLLKKRFSHRPVQEKFVCLNCGFETHADEQAALNIARSWLFLRSQEYKKYQTNKTTGNTDKRAFVETWQSFYRKKLKEVWKPAV

SEQ ID NO: 913 - protein, 980 aa, synthetic construct
  REGION 1..980: note = CasX protein variant
MQEIKRINKIRRRLVKDSNTKKAGKTGPMKTLLVRVMTPDLRERLENLRKKPENIPQPISNTSRANLNKLLTDYTEMKKAILHVYWEEFQKDPVGLMSRVAQPAPKNIDQRKLIPVKDGNERLTSSGFACSQCCQPLYVYKLEQVNDKGKPHTNYFGRCNVSEHERLILLSPHKPEANDELVTYSLGKFGQRALDFYSIHVTRESNHPVKPLEQIGGNSCASGPVGKALSDACMGAVASFLTKYQDIILEHQKVIKKNEKRLANLKDIASANGLAFPKITLPPQPHTKEGIEAYNNVVAQIVIWVNLNLWQKLKIGRDEAKPLQRLKGFPSFPLVERQANEVDWWDMVCNVKKLINEKKEDGKVFWQNLAGYKRQEALLPYLSSEEDRKKGKKFARYQFGDLLLHLEKKHGEDWGKVYDEAWERIDKKVEGLSKHIKLEEERRSEDAQSKAALTDWLRAKASFVIEGLKEADKDEFCRCELKLQKWYGDLRGKPFAIEAENSILDISGFSKQYNCAFIWQKDGVKKLNLYLIINYFKGGKLRFKKIKPEAFEANRFYTVINKKSGEIVPMEVNFNFDDPNLIILPLAFGKRQGREFIWNDLLSLETGSLKLANGRVIEKTLYNRRTRQDEPALFVALTFERREVLDSSNIKPMNLIGIDRGENIPAVIALTDPEGCPLSRFKDSLGNPTHILRIGESYKEKQRTIQAAKEVEQRRAGGYSRKYASKAKNLADDMVRNTARDLLYYAVTQDAMLIFENLSRGFGRQGKRTFMAERQYTRMEDWLTAKLAYEGLPSKASTYLSKTLAQYTSKTCSNCGFTITSADYDRVLEKLKKTATGWMTTINGKELKVEGQITYYNRYKRQNVVKDLSVELDRLSEESVNNDISSWTKGRSGEALSLLKKRFSHRPVQEKFVCLNCGFETHADEQAALNIARSWLFLRSQEYKKYQTNKTTGNTDKRAFVETWQSFYRKKLKEVWKPAV

SEQ ID NO: 914 - protein, 978 aa, synthetic construct
  REGION 1..978: note = CasX protein variant
MQEIKRINKIRRRLVKDSNTKKAGKTGPMKTLLVRVMTPDLRERLENLRKKPENIPQPISNTSRANLNKLLTDYTEMKKAILHVYWEEFQKDPVGLMSRVAQPAPKNIDQRKLIPVKDGNERLTSSGFACSQCCQPLYVYKLEQVNDKGKPHTNYFGRCNVSEHERLILLSPHKPEANDELVTYSLGKFGQRALDFYSIHVTRESNHPVKPLEQIGGNSCASGPVGKALSDACMGAVASFLTKYQDIILEHQKVIKKNEKRLANLKDIASANGLAFPKITLPPQPHTKEGIEAYNNVVAQIVIWVNLNLWQKLKIGRDEAKPLQRLKGFPSFPLVERQANEVDWWDMVCNVKKLINEKKEDGKVFWQNLAGYKRQEALLPYLSSEEDRKKGKKFARYQFGDLLLHLEKKHGEDWGKVYDEAWERIDKKVEGLSKHIKLEEERRSEDAQSKAALTDWLRAKASFVIEGLKEADKDEFCRCELKLQKWYGDLRGKPFAIEAENSILDISGFSKQYNCAFIWQKDGVKKLNLYLIINYFKGGKLRFKKIKPEAFEANRFYTVINKKSGEIVPMEVNFNFDDPNLIILPLAFGKRQGREFIWNDLLSLETGSLKLANGRVIEKTLYNRRTREDEPALFVALTFERREVLDSSNIKPMNLIGIDRGENIPAVIALTDPEGCPLSRFKDSLGNPTHILRIGESYKEKQRTIQAAKEVEQRRAGGYSRKYASKAKNLADDMVRNTARDLLYYAVTQDAMLIFENLSRGFGRQGKRTFMAERQYTRMEDWLTAKLAYEGLPSKTYLSKTLAQYTSKTCSNCGFTITSADYDRVLEKLKKTATGWMTTINGKELKVEGQITYYNRYKRQNVVKDLSVELDRLSEESVNNDISSWTKGRSGEALSLLKKRFSHRPVQEKFVCLNCGFETHADEQAALNIARSWLFLRSQEYKKYQTNKTTGNTDKRAFVETWQSFYRKKLKEVWKPAV

SEQ ID NO: 915 - protein, 978 aa, synthetic construct
  REGION 1..978: note = CasX protein variant
MQEIKRINKIRRRLVKDSNTKKAGKTGPMKTLLVRVMTPDLRERLENLRKKPENIPQPISNTSRANLNKLLTDYTEMKKAILHVYWEEFQKDPVGLMSRVAQPAPKNIDQRKLIPVKDGNERLTSSGFACSQCCQPLYVYKLEQVNDKGKPHTNYFGRCNVSEHERLILLSPHKPEANDELVTYSLGKFGQRALDFYSIHVTRESNHPVKPLEQIGGNSCASGPVGKALSDACMGAVASFLTKYQDIILEHQKVIKKNEKRLANLKDIASANGLAFPKITLPPQPHTKEGIEAYNNVVAQIVIWVNLNLWQKLKIGRDEAKPLQRLKGFPSFPLVERQANEVDWWDMVCNVKKLINEKKEDGKVFWQNLAGYKRQEALLPYLSSEEDRKKGKKFARYQFGDLLLHLEKKHGEDWGKVYDEAWERIDKKVEGLSKHIKLEEERRSEDAQSKAALTDWLRAKASFVIEGLKEADKDEFCRAELKLQKWYGDLRGKPFAIEAENSILDISGFSKQYNCAFIWQKDGVKKLNLYLIINYFKGGKLRFKKIKPEAFEANRFYTVINKKSGEIVPMEVNFNFDDPNLIILPLAFGKRQGREFIWNDLLSLETGSLKLANGRVIEKTLYNRRTRQDEPALFVALTFERREVLDSSNIKPMNLIGIDRGENIPAVIALTDPEGCPLSRFKDSLGNPTHILRIGESYKEKQRTIQAAKEVEQRRAGGYSRKYASKAKNLADDMVRNTARDLLYYAVTQDAMLIFENLSRGFGRQGKRTFMAERQYTRMEDWLTAKLAYEGLPSKTYLSKTLAQYTSKTCSNCGFTITSADYDRVLEKLKKTATGWMTTINGKELKVEGQITYYNRYKRQNVVKDLSVELDRLSEESVNNDISSWTKGRSGEALSLLKKRFSHRPVQEKFVCLNCGFETHADEQAALNIARSWLFLRSQEYKKYQTNKTTGNTDKRAFVETWQSFYRKKLKEVWKPAV

SEQ ID NO: 916 - protein, 978 aa, synthetic construct
  REGION 1..978: note = CasX protein variant
MQEIKRINKIRRRLVKDSNTKKAGKTGPMKTLLVRVMTPDLRERLENLRKKPENIPQPISNTSRANLNKLLTDYTEMKKAILHVYWEEFQKDPVGLMSRVAQPAPKNIDQRKLIPVKDGNERLTSSGFACSQCCQPLYVYKLEQVNDKGKPHTNYFGRCNVSEHERLILLSPHKPEANDELVTYSLGKFGQRALDFYSIHVTRESNHPVKPLEQIGGNSCASGPVGKALSDACMGAVASFLTKYQDIILEHQKVIKKNEKRLANLKDIASANGLAFPKITLPPQPHTKEGIEAYNNVVAQIVIWVNLNLWQKLKIGRDEAKPLQRLKGFPSFPLVEREANEVDWWDMVCNVKKLINEKKEDGKVFWQNLAGYKRQEALLPYLSSEEDRKKGKKFARYQFGDLLLHLEKKHGEDWGKVYDEAWERIDKKVEGLSKHIKLEEERRSEDAQSKAALTDWLRAKASFVIEGLKEADKDEFCRCELKLQKWYGDLRGKPFAIEAENSILDISGFSKQYNCAFIWQKDGVKKLNLYLIINYFKGGKLRFKKIKPEAFEANRFYTVINKKSGEIVPMEVNFNFDDPNLIILPLAFGKRQGREFIWNDLLSLETGSLKLANGRVIEKTLYNRRTRQDEPALFVALTFERREVLDSSNIKPMNLIGIDRGENIPAVIALTDPEGCPLSRFKDSLGNPTHILRIGESYKEKQRTIQAAKEVEQRRAGGYSRKYASKAKNLADDMVRNTARDLLYYAVTQDAMLIFENLSRGFGRQGKRTFMAERQYTRMEDWLTAKLAYEGLPSKTYLSKTLAQYTSKTCSNCGFTITSADYDRVLEKLKKTATGWMTTINGKELKVEGQITYYNRYKRQNVVKDLSVELDRLSEESVNNDISSWTKGRSGEALSLLKKRFSHRPVQEKFVCLNCGFETHADEQAALNIARSWLFLRSQEYKKYQTNKTTGNTDKRAFVETWQSFYRKKLKEVWKPAV

SEQ ID NO: 917 - protein, 978 aa, synthetic construct
  REGION 1..978: note = CasX protein variant
MQEIKRINKIRRRLVKDSNTKKAGQTGPMKTLLVRVMTPDLRERLENLRKKPENIPQPISNTSRANLNKLLTDYTEMKKAILHVYWEEFQKDPVGLMSRVAQPAPKNIDQRKLIPVKDGNERLTSSGFACSQCCQPLYVYKLEQVNDKGKPHTNYFGRCNVSEHERLILLSPHKPEANDELVTYSLGKFGQRALDFYSIHVTRESNHPVKPLEQIGGNSCASGPVGKALSDACMGAVASFLTKYQDIILEHQKVIKKNEKRLANLKDIASANGLAFPKITLPPQPHTKEGIEAYNNVVAQIVIWVNLNLWQKLKIGRDEAKPLQRLKGFPSFPLVERQANEVDWWDMVCNVKKLINEKKEDGKVFWQNLAGYKRQEALLPYLSSEEDRKKGKKFARYQFGDLLLHLEKKHGEDWGKVYDEAWERIDKKVEGLSKHIKLEEERRSEDAQSKAALTDWLRAKASFVIEGLKEADKDEFCRCELKLQKWYGDLRGKPFAIEAENSILDISGFSKQYNCAFIWQKDGVKKLNLYLIINYFKGGKLRFKKIKPEAFEANRFYTVINKKSGEIVPMEVNFNFDDPNLIILPLAFGKRQGREFIWNDLLSLETGSLKLANGRVIEKTLYNRRTRQDEPALFVALTFERREVLDSSNIKPMNLIGIDRGENIPAVIALTDPEGCPLSRFKDSLGNPTHILRIGESYKEKQRTIQAAKEVEQRRAGGYSRKYASKAKNLADDMVRNTARDLLYYAVTQDAMLIFENLSRGFGRQGKRTFMAERQYTRMEDWLTAKLAYEGLPSKTYLSKTLAQYTSKTCSNCGFTITSADYDRVLEKLKKTATGWMTTINGKELKVEGQITYYNRYKRQNVVKDLSVELDRLSEESVNNDISSWTKGRSGEALSLLKKRFSHRPVQEKFVCLNCGFETHADEQAALNIARSWLFLRSQEYKKYQTNKTTGNTDKRAFVETWQSFYRKKLKEVWKPAV

SEQ ID NO: 918 - protein, 980 aa, synthetic construct
  REGION 1..980: note = CasX protein variant
MQEIKRINKIRRRLVKDSNTKKAGKTGPMKTLLVRVMTPDLRERLENLRKKPENIPQPISNTSRANLNKLLTDYTEMKKAILHVYWEEFQKDPVGLMSRVAQPAPKNIDQRKLIPVKDGNERLTSSGFACSQCCQPLYVYKLEQVNDKGKPHTNYFGRCNVSEHERLILLSPHKPEANDELVTYSLGKFGQRALDFYSIHVTRESNHPVKPLEQIGGNSCASGPVGKALSDACMGAVASFLTKYQDIILEHQKVIKKNEKRLANLKDIASANGLAFPKITLPPQPHTKEGIEAYNNVVAQIVIWVNLNLWQKLKIGRDEAKPLQRLKGFPSFPLVERQANEVDWWDMVCNVKKLINEKKEDGKVFWQNLAGYKRQEALLPYLSSEEDRKKGKKFARYQFGDLLLHLEKKHGEDWGKVYDEAWERIDKKVEGLSKHIKLEEERRSEDAQSKAALTDWLRAKASFVIEGLKEADKDEFCRCELKLQKWYGDLRGKPFAIEAENSILDISGFSKQYNCAFIWQKDGVKKLNLYLIINYFKGGKLRFKKIKPEAFEANRFYTVINKKSGEIVPMEVNFNFDDPNLIILPLAFGKRQGREFIWNDLLSLETGSLKLANGRVIEKTLYNRRTRQDEPALFVALTFERREVLDSSNIKPMNLIGIDRGENIPAVIALTDPEGCPLSRFKDSLGNPTHILRIGESYKEKQRTIQAAKEVEQRRAGGYSRKYASKAKNLADDMVRNTARDLLYYAVTQDAMLIFENLSRGFGRQGKRTFMAERQYTRMEDWLTAKLAYEGLPSASKTYLSKTLAQYTSKTCSNCGFTITSADYDRVLEKLKKTATGWMTTINGKELKVEGQITYYNRYKRQNVVKDLSVELDRLSEESVNNDISSWTKGRSGEALSLLKKRFSHRPVQEKFVCLNCGFETHADEQAALNIARSWLFLRSQEYKKYQTNKTTGNTDKRAFVETWQSFYRKKLKEVWKPAV

SEQ ID NO: 919 - protein, 978 aa, synthetic construct
  REGION 1..978: note = CasX protein variant
MQEIKRINKIRRRLVKDSNTKKAGKTGPMKTLLVRVMTPDLRERLENLRKKPENIPQPISNTSRANLNKLLTDYTEMKKAILHVYWEEFQKDPVGLMSRVAQPAPKNIDQRKLIPVKDGNERLTSSGFACSQCCQPLYVYKLEQVNDKGKPHTNYFGRCNVSEHERLILLSPHKPEANDELVTYSLGKFGQRALDFYSIHVTRESNHPVKPLEQIGGNSCASGPVGKALSDACMGAVASFLTKYQDIILEHQKVIKKNEKRLANLKDIASANGLAFPKITLPPQPHTKEGIEAYNNVVAQIVIWVNLNLWQKLKIGRDEAKPLQRLKGFPSFPLVERQANEVDWWDMVCNVKKLINEKKEDGKVFWQNLAGYKRQEALLPYLSSEEDRKKGKKFARYQFGDLLLHLEKKHGEDWGKVYDEAWERIDKKVEGLSKHIKLEEERRSEDAQSKAALTDWLRAKASFVIEGLKEADKDEFCRCEQKLQKWYGDLRGKPFAIEAENSILDISGFSKQYNCAFIWQKDGVKKLNLYLIINYFKGGKLRFKKIKPEAFEANRFYTVINKKSGEIVPMEVNFNFDDPNLIILPLAFGKRQGREFIWNDLLSLETGSLKLANGRVIEKTLYNRRTRQDEPALFVALTFERREVLDSSNIKPMNLIGIDRGENIPAVIALTDPEGCPLSRFKDSLGNPTHILRIGESYKEKQRTIQAAKEVEQRRAGGYSRKYASKAKNLADDMVRNTARDLLYYAVTQDAMLIFENLSRGFGRQGKRTFMAERQYTRMEDWLTAKLAYEGLPSKTYLSKTLAQYTSKTCSNCGFTITSADYDRVLEKLKKTATGWMTTINGKELKVEGQITYYNRYKRQNVVKDLSVELDRLSEESVNNDISSWTKGRSGEALSLLKKRFSHRPVQEKFVCLNCGFETHADEQAALNIARSWLFLRSQEYKKYQTNKTTGNTDKRAFVETWQSFYRKKLKEVWKPAV

SEQ ID NO: 920 - protein, 978 aa, synthetic construct
  REGION 1..978: note = CasX protein variant
MQEIKRINKIRRRLVKDSNTKKAGKTGPMKTLLVRVMTPDLRERLENLRKKPENIPQPISNTSRANLNKLLTDYTEMKKAILHVYWEEFQKDPVGLMSRVAQPAPKNIDQRKLIPVKDGNERLTSSGFACSQCCQPLYVYKLEQVNDKGKPHTNYFGRCNVSEHERLILLSPHKPEANDELVTYSLGKFGQRALDFYSIHVTRESNHPVKPLEQIGGNSCASGPVGKALSDACMGAVASFLTKYQDIILEHQKVIKKNEKRLANLKDIASANGLAFPKITLPPQPHTKEGIEAYNNVVAQIVIWVNLNLWQKLKIGRDEAKPLQRLKGFPSFPLVERQANEVDWWDMVCNVKKLINEKKEDGKVFWQNLAGYKRQEALLPYLSSEEDRKKGKKFARYQFGDLLLHLEKKHGEDWGKVYDEAWERIDKKVEGLSKHIKLEEERRSEDAQSKAALTDWLRAKASFVIEGLKEADKDEFCRCELKLQKWYGDLRGKPFAIEAENSILDISGFSKQYNCAFIWQKDGVKKLNLYLIINYFKGGKLRFKKIKPEAFKANRFYTVINKKSGEIVPMEVNFNFDDPNLIILPLAFGKRQGREFIWNDLLSLETGSLKLANGRVIEKTLYNRRTRQDEPALFVALTFERREVLDSSNIKPMNLIGIDRGENIPAVIALTDPEGCPLSRFKDSLGNPTHILRIGESYKEKQRTIQAAKEVEQRRAGGYSRKYASKAKNLADDMVRNTARDLLYYAVTQDAMLIFENLSRGFGRQGKRTFMAERQYTRMEDWLTAKLAYEGLPSKTYLSKTLAQYTSKTCSNCGFTITSADYDRVLEKLKKTATGWMTTINGKELKVEGQITYYNRYKRQNVVKDLSVELDRLSEESVNNDISSWTKGRSGEALSLLKKRFSHRPVQEKFVCLNCGFETHADEQAALNIARSWLFLRSQEYKKYQTNKTTGNTDKRAFVETWQSFYRKKLKEVWKPAV

SEQ ID NO: 921 - protein, 978 aa, synthetic construct
  REGION 1..978: note = CasX protein variant
MQEIKRINKIRRRLVKDSNTKKAGKTGPMKTLLVRVMTPDLRERLENLRKKPENIPQPISNTSRANLNKLLTDYTEMKKAILHVYWEEFQKDPVGLMSRVAQPAPKNIDQRKLIPVKDGNERLTSSGFACSQCCQPLYVYKLEQVNDKGKPHINYFGRCNVSEHERLILLSPHKPEANDELVTYSLGKFGQRALDFYSIHVTRESNHPVKPLEQIGGNSCASGPVGKALSDACMGAVASFLTKYQDIILEHQKVIKKNEKRLANLKDIASANGLAFPKITLPPQPHTKEGIEAYNNVVAQIVIWVNLNLWQKLKIGRDEAKPLQRLKGFPSFPLVERQANEVDWWDMVCNVKKLINEKKEDGKVFWQNLAGYKRQEALLPYLSSEEDRKKGKKFARYQFGDLLLHLEKKHGEDWGKVYDEAWERIDKKVEGLSKHIKLEEERRSEDAQSKAALTDWLRAKASFVIEGLKEADKDEFCRCELKLQKWYGDLRGKPFAIEAENSILDISGFSKQYNCAFIWQKDGVKKLNLYLIINYFKGGKLRFKKIKPEAFEANRFYTVINKKSGEIVPMEVNFNFDDPNLIILPLAFGKRQGREFIWNDLLSLETGSLKLANGRVIEKTLYNRRTRQDEPALFVALTFERREVLDSSNIKPMNLIGIDRGENIPAVIALTDPEGCPLSRFKDSLGNPTHILRIGESYKEKQRTIQAAKEVEQRRAGGYSRKYASKAKNLADDMVRNTARDLLYYAVTQDAMLIFENLSRGFGRQGKRTFMAERQYTRMEDWLTAKLAYEGLPSKTYLSKTLAQYTSKTCSNCGFTITSADYDRVLEKLKKTATGWMTTINGKELKVEGQITYYNRYKRQNVVKDLSVELDRLSEESVNNDISSWTKGRSGEALSLLKKRFSHRPVQEKFVCLNCGFETHADEQAALNIARSWLFLRSQEYKKYQTNKTTGNTDKRAFVETWQSFYRKKLKEVWKPAV

SEQ ID NO: 922 - protein, 978 aa, synthetic construct
  REGION 1..978: note = CasX protein variant
MQEIKRINKIRRRLVKDSNTKKAGKTGPMKTLLVRVMTPDLRERLENLRKKPENIPQPISNTSRANLNKLLTDYTEMKKAILHVYWEEFQKDPVGLMSRVAQPAPKNIDQRKLIPVKDGNERLTSSGFACSQCCQPLYVYKLEQVNDKGKPHTNYFGRCNVSEHERLILLSPHKPEANDELVTYSLGKFGQRALDFYSIHVTRESNHPVKPLEQIGGNSCASGPVGKALSDACMGAVASFLTKYQDIILEHQKVIKKNEKRLANLKDIASANGLAFPKITLPPQPHTKEGIEAYNNVVAQIVIWVNLNLWQKLKIGRDEAKPLQRLKGFPSFPLVERQANEVDWWDMVCNVKKLINEKKEDGKVFWQNLAGYKRQEALLPYLSSEEDRKKGKKFARYQFGDLLLHLEKKHGEDWGKVYDEAWERIDKKVEGLSKHIKLEEERRSEDAQSKAALTDWLRAKASFVIEGLKEADKDEFCRCELKLQKWYGDLRGKPFAIEAENSILDISGFSKQYNCAFIWQKDGVKKLNLYLIINYFKGGKLRFKKIKPEAFEANRFYTVINKKSGEIVPMEVNFNFDDPNLIILPLAFGKRQGREFIWNDLLSLETGSLKLANGRVIEKTLYNRRTRQDEPALFVALTFERREVLDSSNIKPMNLIGIDRGENIPAVIALTDPEGCPLSRFKDSLGNPTHILRIGESYKEKQRTIQAAKEVEQRRAGGYSRKYASKAKNLADDMVRNTARDLLYYAVTQDAMLIFENLSRGFGRQGKRTFMAERQYTRMEDWLTAKLAYEGLPSKTYLSKTLAQYTSKTCSNCGFTITSADYDRVLEKLKKTATGWMTTINGKELKVEGQITYYNRYKRQNVVKDLSVELDRLSEESVNDDISSWTKGRSGEALSLLKKRFSHRPVQEKFVCLNCGFETHADEQAALNIARSWLFLRSQEYKKYQTNKTTGNTDKRAFVETWQSFYRKKLKEVWKPAV

SEQ ID NO: 923 - protein, 978 aa, synthetic construct; identical to SEQ ID NO: 881
  REGION 1..978: note = CasX protein variant

SEQ ID NO: 924 - protein, 978 aa, synthetic construct
  REGION 1..978: note = CasX protein variant
MQEIKRINKIRRRLVKDSNTKKAGKTGPMKTLLVRVMTPDLRERLENLRKKPENIPQPISNTSRANLNKLLTDYTEMKKAILHVYWEEFQKDPVGLMSRVAQPAPKNIDQRKLIPVKDGNERLTSSGFACSQCCQPLYVYKLEQVNDKGKPHTNYFGRCNVSEHERLILLSPHKPEANDELVTYSLGKFGQRALDFYSIHVTRESNHPVKPLEQIGGNSCASGPVGKALSDASMGAVASFLTKYQDIILEHQKVIKKNEKRLANLKDIASANGLAFPKITLPPQPHTKEGIEAYNNVVAQIVIWVNLNLWQKLKIGRDEAKPLQRLKGFPSFPLVERQANEVDWWDMVCNVKKLINEKKEDGKVFWQNLAGYKRQEALLPYLSSEEDRKKGKKFARYQFGDLLLHLEKKHGEDWGKVYDEAWERIDKKVEGLSKHIKLEEERRSEDAQSKAALTDWLRAKASFVIEGLKEADKDEFCRCELKLQKWYGDLRGKPFAIEAENSILDISGFSKQYNCAFIWQKDGVKKLNLYLIINYFKGGKLRFKKIKPEAFEANRFYTVINKKSGEIVPMEVNFNFDDPNLIILPLAFGKRQGREFIWNDLLSLETGSLKLANGRVIEKTLYNRRTRQDEPALFVALTFERREVLDSSNIKPMNLIGIDRGENIPAVIALTDPEGCPLSRFKDSLGNPTHILRIGESYKEKQRTIQAAKEVEQRRAGGYSRKYASKAKNLADDMVRNTARDLLYYAVTQDAMLIFENLSRGFGRQGKRTFMAERQYTRMEDWLTAKLAYEGLPSKTYLSKTLAQYTSKTCSNCGFTITSADYDRVLEKLKKTATGWMTTINGKELKVEGQITYYNRYKRQNVVKDLSVELDRLSEESVNNDISSWTKGRSGEALSLLKKRFSHRPVQEKFVCLNCGFETHADEQAALNIARSWLFLRSQEYKKYQTNKTTGNTDKRAFVETWQSFYRKKLKEVWKPAV

SEQ ID NO: 925 - protein, 978 aa, synthetic construct
  REGION 1..978: note = CasX protein variant
MQEIKRINKIRRRLVKDSNTKKAGKTGPMKTLLVRVMTPDLRERLENLRKKPENIPQPISNTSRANLNKLLTDYTEMKKAILHVYWEEFQKDPVGLMSRVAQPAPKNIDQRKLIPVKDGNERLTSSGFACSQCCQPLYVYKLEQVNDKGKPHTNYFGRCNVSEHERLILLSPHKPEANDELVTYSLGKFGQRALDFYSIHVTRESNHPVKPLEQIGGNSCASGPVGKALSDACMGAVASFLTKYQDIILEHQKVIKKNEKRLANLKDIASANGLAFPKITLPPQPHTKEGIEAYNNVVAQIVIWVNLNLWQKLKIGRDEAKPLQRLKGFPSFPLVERQANEVDWWDMVCNVKKLINEKKEDGKVFWKNLAGYKRQEALLPYLSSEEDRKKGKKFARYQFGDLLLHLEKKHGEDWGKVYDEAWERSDKKVEGLSKHIKLEEERRSEDAQSKAALTDWLRAKASFVIEGLKEADKDEFCRCELKLQKWYGDLRGKPFAIEAENSILDISGFSKQYNCAFIWQKDGVKKLNLYLIINYFKGGKLRFKKIKPEAFEANRFYTVINKKSGEIVPMEVNFNFDDPNLIILPLAFGKRQGREFIWNDLLSLETGSLKLANGRVIEKTLYNRRTRQDEPALFVALTFERREVLDSSNIKPMNLIGIDRGENIPAVIALTDPEGCPLSRFKDSLGNPTHILRIGESYKEKQRTIQAAKEVEQRRAGGYSRKYASKAKNLADDMVRNTARDLLYYAVTQDAMLIFENLSRGFGRQGKRTFMAERQYTRMEDWLTAKLAYEGLPSKTYLSKTLAQYTSKTCSNCGFTITSADYDRVLEKLKKTATGWMTTINGKELKVEGQITYYNRYKRQNVVKDLSVELDRLSEESVNNDISSWTKGRSGEALSLLKKRFSHRPVQEKFVCLNCGFETHADEQAALNIARSWLFLRSQEYKKYQTNKTTGNTDKRAFVETWQSFYRKKLKEVWKPAV

SEQ ID NO: 926 - protein, 978 aa, synthetic construct
  REGION 1..978: note = CasX protein variant
MQEIKRINKIRRRLVKDSNTKKAGKTGPMKTLLVRVMTPDLRERLENLRKKPENIPQPISNTSRANLNKLLTDYTEMKKAILHVYWEEFQKDPVGLMSRVAQPAPKNIDQRKLIPVKDGNERLTSSGFACSQCCQPLYVYKLEQVNDKGKPHTNYFGRCNVSEHERLILLSPHKPEANDELVTYSLGKFGQRALDFYSIHVTRESNHPVKPLEQIGGNSCASGPVGKALSDACMGAVASFLTKYQDIILEHQKVIKKNEKRLANLKDIASANGLAFPKITLPPQPHTKEGIEAYNNVVAQIVIWVNLNLWQKLKIGRDEAKPLQRLKGFPSFPLVERQANEVDWWDMVCNVKKLINEKKEDGKVFWQNLAGYKRQEALLPYLSSEEDRKKGKKFARYQFGDLLLHLEKKHGEDWGKVYDEAWERIDKKVEGLSKHIKLEEERRSEDAQSKAALTDWLRAKASFVIEGLKEADKDEFCRCELKLQKWYGDLRGKPFAIEAENSILDISGFSKQYNCAFIWQKDGVKKLNLYLIINYFKGGKLRFKKIKPEAFEANRFYTVINKKSGEIVPMEVNFNFDDPNLIILPLAFGKRQGREFIWNDLLSLETGSLKLANGRVIEKTLYNRRTRQDEPALFVALTFERREVLDSSNIKPMNLIGIDRGENIPAVIALTDPEGCPLSRFKDSIGNPTHILRIGESYKEKQRTIQAAKEVEQRRAGGYSRKYASKAKNLADDMVRNTARDLLYYAVTQDAMLIFENLSRGFGRQGKRTFMAERQYTRMEDWLTAKLAYEGLPSKTYLSKTLAQYTSKTCSNCGFTITSADYDRVLEKLKKTATGWMTTINGKELKVEGQITYYNRYKRQNVVKDLSVELDRLSEESVNNDISSWTKGRSGEALSLLKKRFSHRPVQEKFVCLNCGFETHADEQAALNIARSWLFLRSQEYKKYQTNKTTGNTDKRAFVETWQSFYRKKLKEVWKPAV

SEQ ID NO: 927 - protein, 978 aa, synthetic construct
  REGION 1..978: note = CasX protein variant
MQEIKRINKIRRRLVKDSNTKKAGKTGPMKTLLVRVMTPDLRERLENLRKKPENIPQPISNTSRANLNKLLTDYTEMKKAILHVYWEEFQKDPVGLMSRVAQPAPKNIDQRKLIPVKDGNERLTSSGFACSQCCQPLYVYKLEQVNDKGKPHTNYFGRCNVSEHERLILLSPHKPEANDELVTYSLGKFGQRALDFYSIHVTRESNHPVKPLEQIGGNSCASGPVGKALSDACMGAVASFLTKYQDIILEHQKVIKKNEKRLANLKDIASANGLAFPKITLPPQPHTKEGIEAYNNVVAQIVIWVNLNLWQKLKIGRDEAKPLQRLKGFPSFPLVERQANEVDWWDMVCNVKKLINEKKEDGKVFWQNLAGYKRQEALLPYLSSEEDRKKGKKFARYQFGDLLLHLEKKHGEDWGKVYDEAWERIDKKVEGLSKHIKLEEERRSEDAQSKAALTDWLRAKASFVIEGLKEADKDEFCRCELKLQKWYGDLRGKPFAIEAENSILDISGFSKQYNCAFIWQKDGVKKLNLYLIINYFKGGKLRFKKIKPEAFEANRFYTVINKKSGEIVPMEVNFNFDDPNLIILPLAFGKRQGREFIWNDLLSLETGSLKLANGRVIEKTLYNRRTRQDEPALFVALTFERREVLDSSNIKPMNLIGIDRGENIPAVIALTDPEGCPLSRFKDSLGNPTHILRIGESYKEKQRTIQAAKEVEQRRAGGYSRKYASKAKNLADDMVRNTARDLLYYAVTQDAMLIFENLSRGFGRQGKRTFMAERQYTRMEDWLTAKLAYEGLPSKTYLSKTLAQYTSKTCSNCGFTITSADYDRVLEKLKKTATGWMTTINGKELKVEGQITYYNRYKRQNVVKDLSVELDRLSEESVNNDISSWTKGRSGEALSLLKKRFSHRPVQEKFVCLNCGFETHADEQAALNIARSWLFLRSQEYQKYQTNKTTGNTDKRAFVETWQSFYRKKLKEVWKPAV

SEQ ID NO: 928 - protein, 978 aa, synthetic construct
  REGION 1..978: note = CasX protein variant
MQEIKRINKIRRRLVKDSNTKKAGKTGPMKTLLVRVMTPDLRERLEDLRKKPENIPQPISNTSRANLNKLLTDYTEMKKAILHVYWEEFQKDPVGLMSRVAQPAPKNIDQRKLIPVKDGNERLTSSGFACSQCCQPLYVYKLEQVNDKGKPHTNYFGRCNVSEHERLILLSPHKPEANDELVTYSLGKFGQRALDFYSIHVTRESNHPVKPLEQIGGNSCASGPVGKALSDACMGAVASFLTKYQDIILEHQKVIKKNEKRLANLKDIASANGLAFPKITLPPQPHTKEGIEAYNNVVAQIVIWVNLNLWQKLKIGRDEAKPLQRLKGFPSFPLVERQANEVDWWDMVCNVKKLINEKKEDGKVFWQNLAGYKRQEALLPYLSSEEDRKKGKKFARYQFGDLLLHLEKKHGEDWGKVYDEAWERIDKKVEGLSKHIKLEEERRSEDAQSKAALTDWLRAKASFVIEGLKEADKDEFCRCELKLQKWYGDLRGKPFAIEAENSILDISGFSKQYNCAFIWQKDGVKKLNLYLIINYFKGGKLRFKKIKPEAFEANRFYTVINKKSGEIVPMEVNFNFDDPNLIILPLAFGKRQGREFIWNDLLSLETGSLKLANGRVIEKTLYNRRTRQDEPALFVALTFERREVLDSSNIKPMNLIGIDRGENIPAVIALTDPEGCPLSRFKDSLGNPTHILRIGESYKEKQRTIQAAKEVEQRRAGGYSRKYASKAKNLADDMVRNTARDLLYYAVTQDAMLIFENLSRGFGRQGKRTFMAERQYTRMEDWLTAKLAYEGLPSKTYLSKTLAQYTSKTCSNCGFTITSADYDRVLEKLKKTATGWMTTINGKELKVEGQITYYNRYKRQNVVKDLSVELDRLSEESVNNDISSWTKGRSGEALSLLKKRFSHRPVQEKFVCLNCGFETHADEQAALNIARSWLFLRSQEYKKYQTNKTTGNTDKRAFVETWQSFYRKKLKEVWKPAV

SEQ ID NO: 929 - protein, 978 aa, synthetic construct
  REGION 1..978: note = CasX protein variant
MQEIKRINKIRRRLVKDSNTKKAGKTGPMKTLLVRVMTPDLRERLENLRKKPENIPQPISNTSRANLNKLLTDYTEMKKAILHVYWEEFQKDPVGLMSRVAQPAPKNIDQRKLIPVKDGNERLTSSGFACSQCCQPLYVYKLEQVNDKGKPHTNYFGRCNVSEHERLILLSPHKPEANDELVTYSLGKFGQRALDFYSIHVTRESNHPVKPLEQIGGNSCASGPVGKALSDACMGAVASFLTKYQDIILEHQKVIKKNEKRLANLKDIASANGLAFPKITLPPQPHTKEGIEAYNNVVAQIVIWVNLNLWQKLKIGRDEAKPLQRLKGFPSFPLVERQANEVDWWDMVCNVKKLINEKKEDGKVFWQNLAGYKRQEALLPYLSSEEDRKKGKKFARYQFGDLLLHLEKKHGEDWGKVYDEAWERIDKKVEGLSKHIKLEEERRSEDAQSKAALTDWLRAKASFVIEGLKEADKDEFCRCELKLQKWYGDLRGKPFAIEAENSILDISGFSKQYNCAFIWQKDGVKKLNLYLIINYFKGGKLRFKKIKPEAFEANRFYTVINKKSGEIVPMEVNFNFDDPNLIILPLAFGKRQGREFIWNDLLSLETGSLKLANGRVIEKTLYNRRTRQDEPALFMALTFERREVLDSSNIKPMNLIGIDRGENIPAVIALTDPEGCPLSRFKDSLGNPTHILRIGESYKEKQRTIQAAKEVEQRRAGGYSRKYASKAKNLADDMVRNTARDLLYYAVTQDAMLIFENLSRGFGRQGKRTFMAERQYTRMEDWLTAKLAYEGLPSKTYLSKTLAQYTSKTCSNCGFTITSADYDRVLEKLKKTATGWMTTINGKELKVEGQITYYNRYKRQNVVKDLSVELDRLSEESVNNDISSWTKGRSGEALSLLKKRFSHRPVQEKFVCLNCGFETHADEQAALNIARSWLFLRSQEYKKYQTNKTTGNTDKRAFVETWQSFYRKKLKEVWKPAV

SEQ ID NO: 930 - protein, 978 aa, synthetic construct
  REGION 1..978: note = CasX protein variant
MQEIKRINKIRRRLVKDSNTKKAGKTDPMKTLLVRVMTPDLRERLENLRKKPENIPQPISNTSRANLNKLLTDYTEMKKAILHVYWEEFQKDPVGLMSRVAQPAPKNIDQRKLIPVKDGNERLTSSGFACSQCCQPLYVYKLEQVNDKGKPHTNYFGRCNVSEHERLILLSPHKPEANDELVTYSLGKFGQRALDFYSIHVTRESNHPVKPLEQIGGNSCASGPVGKALSDACMGAVASFLTKYQDIILEHQKVIKKNEKRLANLKDIASANGLAFPKITLPPQPHTKEGIEAYNNVVAQIVIWVNLNLWQKLKIGRDEAKPLQRLKGFPSFPLVERQANEVDWWDMVCNVKKLINEKKEDGKVFWQNLAGYKRQEALLPYLSSEEDRKKGKKFARYQFGDLLLHLEKKHGEDWGKVYDEAWERIDKKVEGLSKHIKLEEERRSEDAQSKAALTDWLRAKASFVIEGLKEADKDEFCRCELKLQKWYGDLRGKPFAIEAENSILDISGFSKQYNCAFIWQKDGVKKLNLYLIINYFKGGKLRFKKIKPEAFEANRFYTVINKKSGEIVPMEVNFNFDDPNLIILPLAFGKRQGREFIWNDLLSLETGSLKLANGRVIEKTLYNRRTRQDEPALFVALTFERREVLDSSNIKPMNLIGIDRGENIPAVIALTDPEGCPLSRFKDSLGNPTHILRIGESYKEKQRTIQAAKEVEQRRAGGYSRKYASKAKNLADDMVRNTARDLLYYAVTQDAMLIFENLSRGFGRQGKRTFMAERQYTRMEDWLTAKLAYEGLPSKTYLSKTLAQYTSKTCSNCGFTITSADYDRVLEKLKKTATGWMTTINGKELKVEGQITYYNRYKRQNVVKDLSVELDRLSEESVNNDISSWTKGRSGEALSLLKKRFSHRPVQEKFVCLNCGFETHADEQAALNIARSWLFLRSQEYKKYQTNKTTGNTDKRAFVETWQSFYRKKLKEVWKPAV

SEQ ID NO: 931 - protein, 978 aa, synthetic construct
  REGION 1..978: note = CasX protein variant
MQEIKRINKIRRRLVKDSNTKKAGKTGPMKTLLVRVMTPDLRERLENLRKKPENIPQPISNTSRANLNKLLTDYTEMKKAILHVYWEEFQKDPVGLMSRVAQPAPKNIDQRKLIPVKDGNERLTSSGFACSQCCQPLYVYKLEQVNDKGKPHTNYFGRCNVSEHERLILLSPHKPEANDELVTYSLGKFGQRALDFYSIHVTRESNHPVKPLEQIGGNSCASGPVGKALSDACMGAVASFLTKYQDIILEHQKVIKKNEKRLANLKDIASANGLAFPKITLPPQPHTKEGIEAYNNVVAQIVIWVNLNLWQKLKIGRDEAKPLQRLKGFPSFPLVERQANEVDWWDMVCNVKKLINEKKEDGKVFWQNLAGYKRQEALLPYLSSEEDRKKGKKFARYQFGDLLLHLEKKHGEDWGKVYDEAWERIDKKVEGLSKHIKLEEERRSEDAQSKAALTDWLRAKASFVIEGLKEADKDEFCRLELKLQKWYGDLRGKPFAIEAENSILDISGFSKQYNCAFIWQKDGVKKLNLYLIINYFKGGKLRFKKIKPEAFEANRFYTVINKKSGEIVPMEVNFNFDDPNLIILPLAFGKRQGREFIWNDLLSLETGSLKLANGRVIEKTLYNRRTRQDEPALFVALTFERREVLDSSNIKPMNLIGIDRGENIPAVIALTDPEGCPLSRFKDSLGNPTHILRIGESYKEKQRTIQAAKEVEQRRAGGYSRKYASKAKNLADDMVRNTARDLLYYAVTQDAMLIFENLSRGFGRQGKRTFMAERQYTRMEDWLTAKLAYEGLPSKTYLSKTLAQYTSKTCSNCGFTITSADYDRVLEKLKKTATGWMTTINGKELKVEGQITYYNRYKRQNVVKDLSVELDRLSEESVNNDISSWTKGRSGEALSLLKKRFSHRPVQEKFVCLNCGFETHADEQAALNIARSWLFLRSQEYKKYQTNKTTGNTDKRAFVETWQSFYRKKLKEVWKPAV

SEQ ID NO: 932 - protein, 979 aa, synthetic construct
  REGION 1..979: note = CasX protein variant
MQEIKRINKIRRRLVKDSNTKKAGKTGPMKTLLVRVMTPDLRERLENLRKKPENIPQPISNTSRANLNKLLTDYTEMKKAILHVYWEEFQKDPVGLMSRVAQPAPKNIDQRKLIPVKDGNERLTSSGFACSQCCQPLYVYKLEQVNDKGKPHTNYFGRCNVSEHERLILLSPHKPEANDELVTYSLGKFGQRALDFYSIHVTRESNHPVKPLEQIGGNSCASGPVGKALSDACMGAVASFLTKYQDIILEHQKVIKKNEKRLANLKDIASANGLAFPKITLPPQPHTKEGIEAYNNVVAQIVIWVNLNLWQKLKIGRDEAKPLQRLKGFPSFPLVERQANEVDWWDMVCNVKKLINEKKEDGKVFWQNLAGYKRQEALLPYLSSEEDRKKGKKFARYQFGDLLLHLEKKHGEDWGKVYDEAWERIDKKVEGLSKHIKLEEERRSEDAQSKAALTDWLRAKASFVIEGLKEADKDEFCRCELKLQKWYGDLRGKPFAIEAENSILDISGFSKQYNCAFIWQKDGVKKLNLYLIINYFKGGKLRFKKIKPEAFEANRFYTVINKKSGEIVPMEVNFNFDDPNLIILPLAFGKRQGREFIWNDLLSLETGSLKLANGRVIEKTLYNRRTRQDEPALFVALTFERREVLDSSNIKPMNLIGIDRGENIPAVIALTDPEGCPLSRFKDSLGNPTHILRIGESYKEKQRTIQAAKEVEQRRAGGYSRKYASKAKNLADDMVRNTARDLLYYAVTQDAMLIFENLSRGFGRQGKRTFMAERQYTRMEDWLTAKLAYEGLASSKTYLSKTLAQYTSKTCSNCGFTITSADYDRVLEKLKKTATGWMTTINGKELKVEGQITYYNRYKRQNVVKDLSVELDRLSEESVNNDISSWTKGRSGEALSLLKKRFSHRPVQEKFVCLNCGFETHADEQAALNIARSWLFLRSQEYKKYQTNKTTGNTDKRAFVETWQSFYRKKLKEVWKPAV

SEQ ID NO: 933 - protein, 978 aa, synthetic construct
  REGION 1..978: note = CasX protein variant
MQEIKRINKIRRRLVKDSNTKKAGKTGPMKTLLVRVMTPDLRERLENLRKKPENIPQPISNTSRANLNKLLSDYTEMKKAILHVYWEEFQKDPVGLMSRVAQPAPKNIDQRKLIPVKDGNERLTSSGFACSQCCQPLYVYKLEQVNDKGKPHTNYFGRCNVSEHERLILLSPHKPEANDELVTYSLGKFGQRALDFYSIHVTRESNHPVKPLEQIGGNSCASGPVGKALSDACMGAVASFLTKYQDIILEHQKVIKKNEKRLANLKDIASANGLAFPKITLPPQPHTKEGIEAYNNVVAQIVIWVNLNLWQKLKIGRDEAKPLQRLKGFPSFPLVERQANEVDWWDMVCNVKKLINEKKEDGKVFWQNLAGYKRQEALLPYLSSEEDRKKGKKFARYQFGDLLLHLEKKHGEDWGKVYDEAWERIDKKVEGLSKHIKLEEERRSEDAQSKAALTDWLRAKASFVIEGLKEADKDEFCRCELKLQKWYGDLRGKPFAIEAENSILDISGFSKQYNCAFIWQKDGVKKLNLYLIINYFKGGKLRFKKIKPEAFEANRFYTVINKKSGEIVPMEVNFNFDDPNLIILPLAFGKRQGREFIWNDLLSLETGSLKLANGRVIEKTLYNRRTRQDEPALFVALTFERREVLDSSNIKPMNLIGIDRGENIPAVIALTDPEGCPLSRFKDSLGNPTHILRIGESYKEKQRTIQAAKEVEQRRAGGYSRKYASKAKNLADDMVRNTARDLLYYAVTQDAMLIFENLSRGFGRQGKRTFMAERQYTRMEDWLTAKLAYEGLPSKTYLSKTLAQYTSKTCSNCGFTITSADYDRVLEKLKKTATGWMTTINGKELKVEGQITYYNRYKRQNVVKDLSVELDRLSEESVNNDISSWTKGRSGEALSLLKKRFSHRPVQEKFVCLNCGFETHADEQAALNIARSWLFLRSQEYKKYQTNKTTGNTDKRAFVETWQSFYRKKLKEVWKPAV

SEQ ID NO: 934 - protein, 978 aa, synthetic construct
  REGION 1..978: note = CasX protein variant
MQEIKRINKIRRRLVKDSNTKKAGKTGPMKTLLVRVMTPDLRERLENLRKKPENIPQPISNTSRANLNKLLTDYTEMKKAILHVYWEEFQKDPVGLMSRVAQPAPKNIDQRKLIPVKDGNERLTSSGFACSQCCQPLYVYKLEQVNDKGKPHTNYFGRCNVSEHERLILLSPHKPEANDELVTYSLGKFGQRALDFYSIHVTRESNHPVKPLEQIGGNSCASGPVGKALSDACMGAVASFLTKYQDIILEHQKVIKKNEKRLANLKDIAWANGLAFPKITLPPQPHTKEGIEAYNNVVAQIVIWVNLNLWQKLKIGRDEAKPLQRLKGFPSFPLVERQANEVDWWDMVCNVKKLINEKKEDGKVFWQNLAGYKRQEALLPYLSSEEDRKKGKKFARYQFGDLLLHLEKKHGEDWGKVYDEAWERIDKKVEGLSKHIKLEEERRSEDAQSKAALTDWLRAKASFVIEGLKEADKDEFCRCELKLQKWYGDLRGKPFAIEAENSILDISGFSKQYNCAFIWQKDGVKKLNLYLIINYFKGGKLRFKKIKPEAFEANRFYTVINKKSGEIVPMEVNFNFDDPNLIILPLAFGKRQGREFIWNDLLSLETGSLKLANGRVIEKTLYNRRTRQDEPALFVALTFERREVLDSSNIKPMNLIGIDRGENIPAVIALTDPEGCPLSRFKDSLGNPTHILRIGESYKEKQRTIQAAKEVEQRRAGGYSRKYASKAKNLADDMVRNTARDLLYYAVTQDAMLIFENLSRGFGRQGKRTFMAERQYTRMEDWLTAKLAYEGLPSKTYLSKTLAQYTSKTCSNCGFTITSADYDRVLEKLKKTATGWMTTINGKELKVEGQITYYNRYKRQNVVKDLSVELDRLSEESVNNDISSWTKGRSGEALSLLKKRFSHRPVQEKFVCLNCGFETHADEQAALNIARSWLFLRSQEYKKYQTNKTTGNTDKRAFVETWQSFYRKKLKEVWKPAV

SEQ ID NO: 935 - protein, 978 aa, synthetic construct
  REGION 1..978: note = CasX protein variant
MQEIKRINKIRRRLVKDSNTKKAGKTGPMKTLLVRVMTPDLRERLENLRKKPENIPQPISNTSRANLNKLLTDYTEMKKAILHVYWEEFQKDPVGLMSRVAQPAPKNIDQRKLIPVKDGNERLTSSGFACSQCCQPLYVYKLEQVNDKGKPHTNYFGRCNVSEHERLILLSPHKPEANDELVTYSLGKFGQRALDFYSIHVTRESNHPVKPLEQIGGNSCASGPVGKALSDACMGAVASFLTKYQDIILEHQKVIKKNEKRLANLKDIASANGLAFPKITLPPQPHTKEGIEAYNNVVAQIVIWVNLNLWQKLKIGRDEAKPLQRLKGFPSFPLVERQANEVDWWDMVCNVKKLINEKKEDGKVFWQNLAGYKRQEALLPYLSSEEDRKKGKKFARYQFGDLLLHLEKKHGEDWGKVYDEAWERIDKKVEGLSKHIKLEEERRSEDAQSKAALTDWLRAKASFVIEGLKEADKDEFCRCELKLQKWYGDLRGKPFAIEAENSILDISGFSKQYNCAFIWQKDGVKKLNLYLIINYFKGGKLRFKKIKPEAFEANRFYTVINKKSGEIVPMEVNFNFDDPNLIILPLAFGKRQGREFIWNDLLSLETGSLKLANGRVIEKTLYNRRTRQDEPALFVALTFERREVLDSSNIKPMNLIGIDRGENIPAVIALTDPEGCPLSRFKDSLGNPTHILRIGESYKEKQRTIQAAKEVEQRRAGGYSRKYASKAKNLADDMVRNTARDLLYYAVTQDSMLIFENLSRGFGRQGKRTFMAERQYTRMEDWLTAKLAYEGLPSKTYLSKTLAQYTSKTCSNCGFTITSADYDRVLEKLKKTATGWMTTINGKELKVEGQITYYNRYKRQNVVKDLSVELDRLSEESVNNDISSWTKGRSGEALSLLKKRFSHRPVQEKFVCLNCGFETHADEQAALNIARSWLFLRSQEYKKYQTNKTTGNTDKRAFVETWQSFYRKKLKEVWKPAV

SEQ ID NO: 936 - protein, 978 aa, synthetic construct
  REGION 1..978: note = CasX protein variant
MQEIKRINKIRRRLVKDSNTKKAGKTGPMKTLLVRVMTPDLRERLENLRKKPENIPQPISNTSRANLNKLLTDYTEMKKAILHVYWEEFQKDPVGLMSRVARPAPKNIDQRKLIPVKDGNERLTSSGFACSQCCQPLYVYKLEQVNDKGKPHTNYFGRCNVSEHERLILLSPHKPEANDELVTYSLGKFGQRALDFYSIHVTRESNHPVKPLEQIGGNSCASGPVGKALSDACMGAVASFLTKYQDIILEHQKVIKKNEKRLANLKDIASANGLAFPKITLPPQPHTKEGIEAYNNVVAQIVIWVNLNLWQKLKIGRDEAKPLQRLKGFPSFPLVERQANEVDWWDMVCNVKKLINEKKEDGKVFWQNLAGYKRQEALLPYLSSEEDRKKGKKFARYQFGDLLLHLEKKHGEDWGKVYDEAWERIDKKVEGLSKHIKLEEERRSEDAQSKAALTDWLRAKASFVIEGLKEADKDEFCRCELKLQKWYGDLRGKPFAIEAENSILDISGFSKQYNCAFIWQKDGVKKLNLYLIINYFKGGKLRFKKIKPEAFEANRFYTVINKKSGEIVPMEVNFNFDDPNLIILPLAFGKRQGREFIWNDLLSLETGSLKLANGRVIEKTLYNRRTRQDEPALFVALTFERREVLDSSNIKPMNLIGIDRGENIPAVIALTDPEGCPLSRFKDSLGNPTHILRIGESYKEKQRTIQAAKEVEQRRAGGYSRKYASKAKNLADDMVRNTARDLLYYAVTQDAMLIFENLSRGFGRQGKRTFMAERQYTRMEDWLTAKLAYEGLPSKTYLSKTLAQYTSKTCSNCGFTITSADYDRVLEKLKKTATGWMTTINGKELKVEGQITYYNRYKRQNVVKDLSVELDRLSEESVNNDISSWTKGRSGEALSLLKKRFSHRPVQEKFVCLNCGFETHADEQAALNIARSWLFLRSQEYKKYQTNKTTGNTDKRAFVETWQSFYRKKLKEVWKPAV

SEQ ID NO: 937 - protein, 978 aa, synthetic construct
  REGION 1..978: note = CasX protein variant
MQEIKRINKIRRRLVKDSNTKKAGKTGPMKTLLVRVMTPDLRERLENLRKKPENIPQPISNTSRANLNKLLTDYTEMKKAILHVYWEEFQKDPVGLMSRVAQPAPKNIDQRKLIPVKDGNERLTSSGFACSQCCQPLYVYKLEQVNDKGKPHTNYFGRCNVSEHERLILLSPHKPEANDELVTYSLGKFGQRALDFYSIHVTRESNHPVKPLEQIGGNSCASGPVGKALSDACMGAVASFLTKYQDIILEHQKVIKKNEKRLANLKDIASANGLAFPKITLPPQPHTKEGIEAYNNVVAQIVIWVNLNLWQKLKIGRDEAKPLQRLKGFPSFPLVERQANEVDWWDMVCNVKKLINEKKEDGKVFWQNLAGYKRQEALLPYLSSEEDRKKGKKFARYQFGDLLLHLEKKHGEDWGKVYDEAWERIDKKVEGLSKHIKLEEERRSEDAQSKAALTDWLRAKASFVIEGLKEADKDEFCRCELKLQKWYGDLRGKPFAIEAENSILDISGFSKQYNCAFIWQKDGVKKLNLYLIINYFKGGKLRFKKIKPEAFEANRFYTVINKKSGEIVPMEVNFNFDDPNLIILPLAFGKRQGREFIWNDLLSLETGSLKLANGRVIEKTLYNRRTRQDEPALFVALTFERREVLDSSNIKPMNLIGIDRGENIPAVIALTDPEGCPLSRFKDSLGNPTHILRIGESYKEKQRTIQAAKEVEQRRAGGYSRKYASKAKNLADDKVRNTARDLLYYAVTQDAMLIFENLSRGFGRQGKRTFMAERQYTRMEDWLTAKLAYEGLPSKTYLSKTLAQYTSKTCSNCGFTITSADYDRVLEKLKKTATGWMTTINGKELKVEGQITYYNRYKRQNVVKDLSVELDRLSEESVNNDISSWTKGRSGEALSLLKKRFSHRPVQEKFVCLNCGFETHADEQAALNIARSWLFLRSQEYKKYQTNKTTGNTDKRAFVETWQSFYRKKLKEVWKPAV

SEQ ID NO: 938 - protein, 980 aa, synthetic construct; identical to SEQ ID NO: 918
  REGION 1..980: note = CasX protein variant

SEQ ID NO: 939 - protein, 978 aa, synthetic construct
  REGION 1..978: note = CasX protein variant
MQEIKRINKIRRRLVKDSNTKKAGKTGPMKTLLVRVMTPDLRERLENLRKKPENIPQPISNTSRANLNKLLTDYTEMKKAILHVYWEEFQKDPVGLMSRVAQPAPKNIDQRKLIPVKDGNERLTSSGFACSQCCQPLYVYKLEQVNDKGKPHTNYFGRCNVSEHERLILLSPHKPEANDELVTYSLGKYGQRALDFYSIHVTRESNHPVKPLEQIGGNSCASGPVGKALSDACMGAVASFLTKYQDIILEHQKVIKKNEKRLANLKDIASANGLAFPKITLPPQPHTKEGIEAYNNVVAQIVIWVNLNLWQKLKIGRDEAKPLQRLKGFPSFPLVERQANEVDWWDMVCNVKKLINEKKEDGKVFWQNLAGYKRQEALLPYLSSEEDRKKGKKFARYQFGDLLLHLEKKHGEDWGKVYDEAWERIDKKVEGLSKHIKLEEERRSEDAQSKAALTDWLRAKASFVIEGLKEADKDEFCRCELKLQKWYGDLRGKPFAIEAENSILDISGFSKQYNCAFIWQKDGVKKLNLYLIINYFKGGKLRFKKIKPEAFEANRFYTVINKKSGEIVPMEVNFNFDDPNLIILPLAFGKRQGREFIWNDLLSLETGSLKLANGRVIEKTLYNRRTRQDEPALFVALTFERREVLDSSNIKPMNLIGIDRGENIPAVIALTDPEGCPLSRFKDSLGNPTHILRIGESYKEKQRTIQAAKEVEQRRAGGYSRKYASKAKNLADDMVRNTARDLLYYAVTQDAMLIFENLSRGFGRQGKRTFMAERQYTRMEDWLTAKLAYEGLPSKTYLSKTLAQYTSKTCSNCGFTITSADYDRVLEKLKKTATGWMTTINGKELKVEGQITYYNRYKRQNVVKDLSVELDRLSEESVNNDISSWTKGRSGEALSLLKKRFSHRPVQEKFVCLNCGFETHADEQAALNIARSWLFLRSQEYKKYQTNKTTGNTDKRAFVETWQSFYRKKLKEVWKPAV

SEQ ID NO: 940 - protein, 978 aa, synthetic construct
  REGION 1..978: note = CasX protein variant
MQEIKRINKIRRRLVKDSNTKKAGKTGPMKTLLVRVMTPDLRERLENLRKKPENIPQPISNTSRANLNKLLTDYTEMKKAILHVYWEEFQKDPVGLMSRVAQPAPKNIDQRKLIPVKDGNERLTSSGFACSQCCQPLYVYKLEQVNDKGKPHTNYFGRCNVSEHERLILLSPHKPEANDELVTYSLGKFGQRALDFYSIHVTRESNHPVKPLEQIGGNSCASGPVGKALSDACMGAVASFLTKYQDIILEHQKVIKKNEKRLANLKDIASANGLAFPKITLPPQPHTKEGIEAYNNVVAQIVIWVNLNLWQKLKIGRDEAKPLQRLKGFPSFPLVERQANEVDWWDMVCNVKKLINEKKEDGKVFWQNLAGYKRQEALLPYLSSEEDRKKGKKFARYQFGDLLLHLEKKHGEDWGKVYDEAWERIDKKVEGLSKHIKLEEERRSEDAQSKAALTDWLRAKASFVIEGLKEADKDEFCRCELKLQKWYGDLRGKPFAIEAENSILDISGFSKQYNCAFIWQKDGVKKLNLYLIINYFKGGKLRFKKIKPEAFEANRFYTVINKKSGEIVPMEVNFNFDDPNLIILPLAFGKRQGREFIWNDLLSLETGSLKLANGRVIEKTLYNRRTRQDEPALFVALTFERREVLDSSNIKPMNLIGIDRGENIPAVIALTDPEGCPLSRFKDSLGNPTHILRIGESYKEKQRTIQAAKEVEQRRAGGYSRKYASKAKNLADDMVRNTARDLLYYAVTQDAMLIFENLSRGFGRQGKRTFMAERQYTRMEDWLTAKLAYEGLPSKTYLSKTLAQYTSKTCSNCGFTITSADYDRVLEKLKKTATGWMTTINGKELKVEGQITYYNRYKRQNVVKDLSVELDRLSEESVNNDISSRTKGRSGEALSLLKKRFSHRPVQEKFVCLNCGFETHADEQAALNIARSWLFLRSQEYKKYQTNKTTGNTDKRAFVETWQSFYRKKLKEVWKPAV

SEQ ID NO: 941 - protein, 978 aa, synthetic construct
  REGION 1..978: note = CasX protein variant
MQEIKRINKIRRRLVKDSNTKKAGKTGPMKTLLVRVMTPDLRERLENLRKKPENIPQPISNTSRANLNKLLTDYTEMKKAILHVYWEEFQKDPVGLMSRVAQPAPKNIDQRKLIPVKDGNERLTSSGFACSQCCQPLYVYKLEQVNDKGKPHTNYFGRCNVSEHERLILLSPHKPEANDELVTYSLGKFGQRALDFYSIHVTRESNHPVKPLEQIGGNSCASGPVGKALSDACMGAVASFLTKYQDIILEHQKVIKKNEKRLANLKDIASANGLAFPKITLPPQPHTKEGIEAYNNVVAQIVIWVNLNLWQKLKIGRDEAKPLQRLKGFPSFPLVERQANEVDWWDMVCNVKKLINEKKEDGKVFWQNLAGYKRQEALLPYLSSEEDRKKGKKFARYQFGDLLLHLEKKHGEDWGKVYDEAWERIDKKVEGLSKHIKLEEERRSEDAQSKAALTDWLRAKASFVIEGLKEADKDEFCRCELKLQKWYGDLRGKPFAIEAENSILDISGFSKQYNCAFIWQKDGVKKLNLYLIINYFKGGKLRFKKIKPEAFEANRFYTVINKKSGEIVPMEVNFNFDDPNLIILPLAFGKRQGREFIWNDLLSLETGSLKLANGRVIEKTLYNRRTRQDEPALFVDLTFERREVLDSSNIKPMNLIGIDRGENIPAVIALTDPEGCPLSRFKDSLGNPTHILRIGESYKEKQRTIQAAKEVEQRRAGGYSRKYASKAKNLADDMVRNTARDLLYYAVTQDAMLIFENLSRGFGRQGKRTFMAERQYTRMEDWLTAKLAYEGLPSKTYLSKTLAQYTSKTCSNCGFTITSADYDRVLEKLKKTATGWMTTINGKELKVEGQITYYNRYKRQNVVKDLSVELDRLSEESVNNDISSWTKGRSGEALSLLKKRFSHRPVQEKFVCLNCGFETHADEQAALNIARSWLFLRSQEYKKYQTNKTTGNTDKRAFVETWQSFYRKKLKEVWKPAV

SEQ ID NO: 942 - protein, 978 aa, synthetic construct
  REGION 1..978: note = CasX protein variant
MQEIKRINKIRRRLVKDSNTKKAGKTGPMKTLLVRVMTPDLRERLENLRKKPENIPQPISNTSRANLNKLLTDYTEMKKAILHVYWEEFQKDPVGLMSRVAQPAPKNIDQRKLIPVKDGNERLTSSGFACSQCCQPLYVYKLEQVNDKGKPHTNYFGRCNVSEHERLILLSPHKPEANDELVTYSLGKFGQRALDFYSIHVTRESNHPVKPLEQIGGNSCASGPVGKALSDACMGAVASFLTKYQDIILEHQKVIKKNEKRLANLKDIASANGLAFPKITLPPQPHTKEGIEAYNNVVAQIVIWVNLNLWQKLKIGRDEAKPLQRLKGFPSFPLVERQANEVDWWDMVCNVKKLINEKKEDGKVFWQNLAGYKRQEALLPYLSSEEDRKKGKKFARYQFGDLLLHLEKKHGEDWGEVYDEAWERIDKKVEGLSKHIKLEEERRSEDAQSKAALTDWLRAKASFVIEGLKEADKDEFCRCELKLQKWYGDLRGKPFAIEAENSILDISGFSKQYNCAFIWQKDGVKKLNLYLIINYFKGGKLRFKKIKPEAFEANRFYTVINKKSGEIVPMEVNFNFDDPNLIILPLAFGKRQGREFIWNDLLSLETGSLKLANGRVIEKTLYNRRTRQDEPALFVALTFERREVLDSSNIKPMNLIGIDRGENIPAVIALTDPEGCPLSRFKDSLGNPTHILRIGESYKEKQRTIQAAKEVEQRRAGGYSRKYASKAKNLADDMVRNTARDLLYYAVTQDAMLIFENLSRGFGRQGKRTFMAERQYTRMEDWLTAKLAYEGLPSKTYLSKTLAQYTSKTCSNCGFTITSADYDRVLEKLKKTATGWMTTINGKELKVEGQITYYNRYKRQNVVKDLSVELDRLSEESVNNDISSWTKGRSGEALSLLKKRFSHRPVQEKFVCLNCGFETHADEQAALNIARSWLFLRSQEYKKYQTNKTTGNTDKRAFVETWQSFYRKKLKEVWKPAV

SEQ ID NO: 943 - protein, 978 aa, synthetic construct
  REGION 1..978: note = CasX protein variant
MQEIKRINKIRRRLVKDSNTKKAGKTGPMKTLLVRVMTPDLRERLENLRKKPENIPQPISNTSRANLNKLLTDYTEMKKAILHVYWEEFQKDPVGLMSRVAQPAPKNIDQRKLIPVKDGNERLTSSGFACSQCCQPLYVYKLEQVNDKGKPHTNYFGRCNVSEHERLILLSPHKPEANDELVTYSLGKFGQRALDFYSIHVTRESNHPVKPLEQIGGNSCASGPVGKALSDACMGAVASFLTKYQDIILEHQKVIKKNEKRLANLKDIASANGLAFPKITLPPQPHTKEGIEAYNNVVAQIVIWVNLNLWQKLKIGRDEAKPLQRLKGFPSFPLVERQANEVDWWDMVCNVKKLINEKKEDGKVFWQNLAGYKRQEALLPYLSSEEDRKKGKKFARYQFGDLLLHLEKKHGEDWGKVYDEAWERIDKKVEGLSKHIKLEEERRSEDAQSKAALTDWLRAKASFVIEGLKEADKDEFCRCELKLQKWYGDLRGKPFAIEAENSILDISGFSKQYNCAFIWQKDGVKKLNLYLIINYFKGGKLRFKKIKPEAFEANRFYTVINKKSGEIVPMEVNFNFDDPNLIILPLAFGKRQGREFIWNDLLSLETGSLKLANGRVIEKTLYNRRTRQDEPALFVALTFERREVLDSSNIKPMNLIGIDRGENIPAVIALTDPEGCPLSRFKDSLGNPTHILIIGESYKEKQRTIQAAKEVEQRRAGGYSRKYASKAKNLADDMVRNTARDLLYYAVTQDAMLIFENLSRGFGRQGKRTFMAERQYTRMEDWLTAKLAYEGLPSKTYLSKTLAQYTSKTCSNCGFTITSADYDRVLEKLKKTATGWMTTINGKELKVEGQITYYNRYKRQNVVKDLSVELDRLSEESVNNDISSWTKGRSGEALSLLKKRFSHRPVQEKFVCLNCGFETHADEQAALNIARSWLFLRSQEYKKYQTNKTTGNTDKRAFVETWQSFYRKKLKEVWKPAV

SEQ ID NO: 944 - protein, 978 aa, synthetic construct
  REGION 1..978: note = CasX protein variant
MQEIKRINKIRRRLVKDSNTKKAGKTGPRKTLLVRVMTPDLRERLENLRKKPENIPQPISNTSRANLNKLLTDYTEMKKAILHVYWEEFQKDPVGLMSRVAQPAPKNIDQRKLIPVKDGNERLTSSGFACSQCCQPLYVYKLEQVNDKGKPHTNYFGRCNVSEHERLILLSPHKPEANDELVTYSLGKFGQRALDFYSIHVTRESNHPVKPLEQIGGNSCASGPVGKALSDACMGAVASFLTKYQDIILEHQKVIKKNEKRLANLKDIASANGLAFPKITLPPQPHTKEGIEAYNNVVAQIVIWVNLNLWQKLKIGRDEAKPLQRLKGFPSFPLVERQANEVDWWDMVCNVKKLINEKKEDGKVFWQNLAGYKRQEALLPYLSSEEDRKKGKKFARYQFGDLLLHLEKKHGEDWGKVYDEAWERIDKKVEGLSKHIKLEEERRSEDAQSKAALTDWLRAKASFVIEGLKEADKDEFCRCELKLQKWYGDLRGKPFAIEAENSILDISGFSKQYNCAFIWQKDGVKKLNLYLIINYFKGGKLRFKKIKPEAFEANRFYTVINKKSGEIVPMEVNFNFDDPNLIILPLAFGKRQGREFIWNDLLSLETGSLKLANGRVIEKTLYNRRTRQDEPALFVALTFERREVLDSSNIKPMNLIGIDRGENIPAVIALTDPEGCPLSRFKDSLGNPTHILRIGESYKEKQRTIQAAKEVEQRRAGGYSRKYASKAKNLADDMVRNTARDLLYYAVTQDAMLIFENLSRGFGRQGKRTFMAERQYTRMEDWLTAKLAYEGLPSKTYLSKTLAQYTSKTCSNCGFTITSADYDRVLEKLKKTATGWMTTINGKELKVEGQITYYNRYKRQNVVKDLSVELDRLSEESVNNDISSWTKGRSGEALSLLKKRFSHRPVQEKFVCLNCGFETHADEQAALNIARSWLFLRSQEYKKYQTNKTTGNTDKRAFVETWQSFYRKKLKEVWKPAV

SEQ ID NO: 945 - protein, 978 aa, synthetic construct
  REGION 1..978: note = CasX protein variant
MQEIKRINKIRRRLVKDSNTKKAGKTGPMKTLLVRVMTPDLRERLENLRKKPENIPQPISNTSRANLNKLLTDYTEMKKAILHVYWEEFQKDPVGLMSRVAQPAPKNIDQRKLIPVKDGNERLTSSGFACSQCCQPLYVYKLEQVNDKGKPHTNYFGRCNVSEHERLILLSPHKPEANDELVTYSLGKFGQRALDFYSIHVTRESNHPVKPLEQIGGNSCASGPVGKALSDACMGAVASFLTKYQDIILEHQKVIKKNEKRLANLKDIASANGLAFPKITLPPQPHTKEGIEAYNNVVAQIVIWVNLNLWQKLKIGRDEAKPLQRLKGFPSFPLVERQANEVDWWDMVCNVKKLINEKKEDGKVFWQNLAGYKRQEALLPYLSSEEDRKKGKKFARYQFGDLLLHLEKKHGEDWGKVYDEAWERIDKKVEGLSKHIKLEEERRSEDAQSKAALTDWLRAKASFVIEGLKEADKDEFCRCELKLQKWYGDLRGKPFAIEAENSILDISGFSKQYNCAFIWQKDGVKKLNLYLIINYFKGGKLRFKKIKPEAFEANRFYTVINKKSGEIVPMEVNFNFDDPNLIILPLAFGKRQGREFIWNDLLSLETGSLKLANGRVIEKTLYNRRTRQDEPALFVALTFERREVLDSSNIKPMNLIGIDRGENIPAVIALTDPEGCPLSRFKDSLGNPTHILRIGESYKEKQRTIQAAKEVEQRRAGGYSRKYASKAKNLADDMVRNTARDLLYYAVTQDAMLIFENLSRGFGRQGKRTFMAERQYTRMEDWLTAKLAYEGLPSKTYLSKTLAQYTSKTCSNCGFTITSADYDRVLEKLKKTATGWMTTINGKELKVEGQITYYNRYKRQNVVKDLSVELDRLSEESVNNDISSWTKGRSGEALSLLKKRFSHRPVQEKFVCLNCGFETHADEQAALNIARSWLFLRSQEYKKYQPNKTTGNTDKRAFVETWQSFYRKKLKEVWKPAV

SEQ ID NO: 946 - protein, 979 aa, synthetic construct
  REGION 1..979: note = CasX protein variant
MQEIKRINKIRRRLVKDSNTKKAGKTGPMKTLLVRVMTPDLRERLENLRKKPENIPQPISNTSRANLNKLLTDYTEMKKAILHVYWEEFQKDPVGLMSRVAQPAPKNIDQRKLIPVKDGNERLTSSGFACSQCCQPLYVYKLEQVNDKGKPHTNYFGRCNVSEHERLILLSPHKPEANDELVTYSLGKFGQRALDFYSIHVTRESNHPVKPLEQIGGNSCASGPVGKALSDACMGAVASFLTKYQDIILEHQKVIKKNEKRLANLKDIASANGLAFPKITLPPQPHTKEGIEAYNNVVAQIVIWVNLNLWQKLKIGRDEAKPLQRLKGFPSFPLVERQANEVDWWDMVCNVKKLINEKKEDGKVFWQNLAGYKRQEALLPYLSSEEDRKKGKKFARYQFGDLLLHLEKKHGEDWGKVYDEAWERIDKKVEGLSKHIKLEEERRSEDAQSKAALTDWLRAKASFVIEGLKEADKDEFCRCELKLQKWYGDLRGKPFAIEAENSILDISGFSKQYNCAFIWQKDGVKKLNLYLIINYFKGGKLRFKKIKPEAFEANRFYTVINKKSGEIVPMEVNFNFDDPNLIILPLAFGKRQGREFIWNDLLSLETGSLKLANGRVIEKTLYNRRTRQDEPALFVALTFERREVLDSSNIKPMNLIGIDRGENIPAVIALTDPEGCPLSRFKDSLGNPTHILRIGESYKEKQRTIQAAKEVEQRRAGGYSRKYASKAKNLADDMVRNTARDLLYYAVTQDAMLIFENLSRGFGRQGKRTFMAERQYTRMEDWLTAKLAYEGLPSKTYLSKTLAQYTSKTCSNCGFTITSADYDRVLEKLKKTATGWMTTINGKELKVEGQITYYNRYKRQNVVKDLSVELDRLSEESVNNDISSWTKGLRSGEALSLLKKRFSHRPVQEKFVCLNCGFETHADEQAALNIARSWLFLRSQEYKKYQTNKTTGNTDKRAFVETWQSFYRKKLKEVWKPAV

SEQ ID NO: 947 - protein, 978 aa, synthetic construct
  REGION 1..978: note = CasX protein variant
MQEIKRINKIRRRLVKDSNTKKAGKTGPMKTLLVRVMTPDLRERLENLRKKPENIPQPISNTSRANLNKLLTDYTEMKKAILHVYWEEFQKDPVGLMSRVAQPAPKNIDQRKLIPVKDGNDRLTSSGFACSQCCQPLYVYKLEQVNDKGKPHTNYFGRCNVSEHERLILLSPHKPEANDELVTYSLGKFGQRALDFYSIHVTRESNHPVKPLEQIGGNSCASGPVGKALSDACMGAVASFLTKYQDIILEHQKVIKKNEKRLANLKDIASANGLAFPKITLPPQPHTKEGIEAYNNVVAQIVIWVNLNLWQKLKIGRDEAKPLQRLKGFPSFPLVERQANEVDWWDMVCNVKKLINEKKEDGKVFWQNLAGYKRQEALLPYLSSEEDRKKGKKFARYQFGDLLLHLEKKHGEDWGKVYDEAWERIDKKVEGLSKHIKLEEERRSEDAQSKAALTDWLRAKASFVIEGLKEADKDEFCRCELKLQKWYGDLRGKPFAIEAENSILDISGFSKQYNCAFIWQKDGVKKLNLYLIINYFKGGKLRFKKIKPEAFEANRFYTVINKKSGEIVPMEVNFNFDDPNLIILPLAFGKRQGREFIWNDLLSLETGSLKLANGRVIEKTLYNRRTRQDEPALFVALTFERREVLDSSNIKPMNLIGIDRGENIPAVIALTDPEGCPLSRFKDSLGNPTHILRIGESYKEKQRTIQAAKEVEQRRAGGYSRKYASKAKNLADDMVRNTARDLLYYAVTQDAMLIFENLSRGFGRQGKRTFMAERQYTRMEDWLTAKLAYEGLPSKTYLSKTLAQYTSKTCSNCGFTITSADYDRVLEKLKKTATGWMTTINGKELKVEGQITYYNRYKRQNVVKDLSVELDRLSEESVNNDISSWTKGRSGEALSLLKKRFSHRPVQEKFVCLNCGFETHADEQAALNIARSWLFLRSQEYKKYQTNKTTGNTDKRAFVETWQSFYRKKLKEVWKPAV

SEQ ID NO: 948 - protein, 978 aa, synthetic construct
  REGION 1..978: note = CasX protein variant
MQEIKRINKIRRRLVKDSNTKKAGKTGPMKTLLVRVMTPDLRERLENLRKKPENIPQPISNTSRANLNKLLTDYTEMKKAILHVYWEEFQKDPVGLMSRVAQPAPKNIDQRKLIPVKDGNERLTSSGFACSQCCQPLYVYKLEQVNDKGKPHTNYFGRCNVSEHERLILLSPHKPEANDELVTYSLGKFGQRALDFYSIHVTRESNHPVKPLEQIGGNSCASGKVGKALSDACMGAVASFLTKYQDIILEHQKVIKKNEKRLANLKDIASANGLAFPKITLPPQPHTKEGIEAYNNVVAQIVIWVNLNLWQKLKIGRDEAKPLQRLKGFPSFPLVERQANEVDWWDMVCNVKKLINEKKEDGKVFWQNLAGYKRQEALLPYLSSEEDRKKGKKFARYQFGDLLLHLEKKHGEDWGKVYDEAWERIDKKVEGLSKHIKLEEERRSEDAQSKAALTDWLRAKASFVIEGLKEADKDEFCRCELKLQKWYGDLRGKPFAIEAENSILDISGFSKQYNCAFIWQKDGVKKLNLYLIINYFKGGKLRFKKIKPEAFEANRFYTVINKKSGEIVPMEVNFNFDDPNLIILPLAFGKRQGREFIWNDLLSLETGSLKLANGRVIEKTLYNRRTRQDEPALFVALTFERREVLDSSNIKPMNLIGIDRGENIPAVIALTDPEGCPLSRFKDSLGNPTHILRIGESYKEKQRTIQAAKEVEQRRAGGYSRKYASKAKNLADDMVRNTARDLLYYAVTQDAMLIFENLSRGFGRQGKRTFMAERQYTRMEDWLTAKLAYEGLPSKTYLSKTLAQYTSKTCSNCGFTITSADYDRVLEKLKKTATGWMTTINGKELKVEGQITYYNRYKRQNVVKDLSVELDRLSEESVNNDISSWTKGRSGEALSLLKKRFSHRPVQEKFVCLNCGFETHADEQAALNIARSWLFLRSQEYKKYQTNKTTGNTDKRAFVETWQSFYRKKLKEVWKPAV

SEQ ID NO: 949 - protein, 978 aa, synthetic construct
  REGION 1..978: note = CasX protein variant
MQEIKRINKIRRRLVKDSNTKKAGKTGPMKTLLVRVMTPDLRERLENLRKKPENIPQPISNTSRANLNKLLTDYTEMKKAILHVYWEEFQKDPVGLMSRVAQPAPKNIDQRKLIPVKDGNERLTSSGFACSQCCQPLYVYKLEQVNDKGKPHTNYFGRCNVSEHERLILLSPHKPEANDELVTYSLGKFGQRALDFYSIHVTRESNHPVKPLEQIGGNSCASGPVGKALSDACMGAVASFLTKYQDIILEHQKVIKKNEKRLANLKDIASANGLAFPKITLPPQPHTKEGIEAYNNVVAQIVIWVNLNLWQKLKIGRDEAKPLQRLKGFPSFPLVERQANEVDWWDMVCNVKKLINEKKEDGKVFWQNLAGYKRQEALLPYLSSEEDRKKGKKFARYQFGDLLLHLEKKHGEDWGKVYDEAWERIDKKVEGLSKHIKLEEERRSEDAQSKAALTDWLRAKASFVIEGLKEADKDEFCRCELKLQKWYGDLRGKPFAIEAENSILDISGFSKQYNCAFIWQKDGVKKLNLYLIINYFKGGKLRFKKIKPEAFEANRFYTVINKKSGEIVPMEVNFNFDDPNLIILPLAFGKRQGREFIWNDLLSLETGSLKLANGRVIEKTLYNRRTRQDEPALFVALTFERREVLDSSNIKPMNLIGIDRGENIPAVIALTDPEGCPLSRFKDSLGNPTHILRIGESYKEKQRTIQAAKEVEQRRAGGYSRKYASKAKNLADDMVRNTARDLLYYAVTQDAMLIFENLSRGFGRQGRRTFMAERQYTRMEDWLTAKLAYEGLPSKTYLSKTLAQYTSKTCSNCGFTITSADYDRVLEKLKKTATGWMTTINGKELKVEGQITYYNRYKRQNVVKDLSVELDRLSEESVNNDISSWTKGRSGEALSLLKKRFSHRPVQEKFVCLNCGFETHADEQAALNIARSWLFLRSQEYKKYQTNKTTGNTDKRAFVETWQSFYRKKLKEVWKPAV

SEQ ID NO: 950 - protein, 978 aa, synthetic construct
  REGION 1..978: note = CasX protein variant
MQEIKRINKIRRRLVKDSNTKKAGKTGPMKTLLVRVMTPDLRERLENLRKKPENIPQPISNTSRANLNKLLTDYTEMKKAILHVYWEEFQKDPVGLMSRVAQPAPKNIDQRKLIPVKDGNERLTSSGFACSQCCQPLYVYKLEQVNDKGKPHTNYFGRCNVSEHERLILLSPHKPEANDELVTYSLGKFGQRALDFYSIHVTRESNHPVKPLEQIGGNSCASGPVGKALSDACMGAVASFLTKYQDIILEHQKVIKKNEKRLANLKDIASANGLAFPKITLPPQPHTKEGIEAYNNVVAQIVIWVNLNLWQKLKIGRDEAKPLQRLKGFPSFPLVERQANEVDWWDMVCNVKKLINEKKEDGKVFWQNLAGYKRQEALLPYLSSEEDRKKGKKFARYQFGDLLLHLEKKHGEDWGKVYDEAWERIDKKVEGLSKHIKLEEERRSEDAQSKAALTDWLRAKASFVIEGLKEADKDEFCRCKLKLQKWYGDLRGKPFAIEAENSILDISGFSKQYNCAFIWQKDGVKKLNLYLIINYFKGGKLRFKKIKPEAFEANRFYTVINKKSGEIVPMEVNFNFDDPNLIILPLAFGKRQGREFIWNDLLSLETGSLKLANGRVIEKTLYNRRTRQDEPALFVALTFERREVLDSSNIKPMNLIGIDRGENIPAVIALTDPEGCPLSRFKDSLGNPTHILRIGESYKEKQRTIQAAKEVEQRRAGGYSRKYASKAKNLADDMVRNTARDLLYYAVTQDAMLIFENLSRGFGRQGKRTFMAERQYTRMEDWLTAKLAYEGLPSKTYLSKTLAQYTSKTCSNCGFTITSADYDRVLEKLKKTATGWMTTINGKELKVEGQITYYNRYKRQNVVKDLSVELDRLSEESVNNDISSWTKGRSGEALSLLKKRFSHRPVQEKFVCLNCGFETHADEQAALNIARSWLFLRSQEYKKYQTNKTTGNTDKRAFVETWQSFYRKKLKEVWKPAV

SEQ ID NO: 951 - protein, 978 aa, synthetic construct
  REGION 1..978: note = CasX protein variant
MQEIKRINKIRRRLVKDSNTKKAGKTGPMKTLLVRVMTPDLRERLENLRKKPENIPQPISNTSRANLNKLLTDYTEMKKAILHVYWEEFQKDPVGLMSRVAQPAPKNIDQRKLIPVKDGNERLTSSGFACSQCCQPLYVYKLEQVNDKGKPHTNYFGRCNVSEHERLILLSPHKPEANDELVTYSLGKFGQRALDFYSIHVTRESNHPVKPLEQIGGNSCASGPVGKALSDACMGAVASFLTKYQDIILEHQKVIKKNEKRLANLKDIASANGLAFPKITLPPQPHTKEGIEAYNNVVAQIVIWVNLNLWQKLKIGRDEAKPLQRLKGFPSFPLVERQANEVDWWDMVCNVKKLINEKKEDGKVFWQNLAGYKRQEALLPYLSSEEDRKKGKKFARYQFGDLLLHLEKKHGEDWGKVYDEAWERIDKKVEGLSKHIKLEEERRSEDAQSKAALTDWLRAKASFVIEGLKEADKDEFCRCELKLQKWYGDLRGKPFAIEAENSILDISGFSKQYNCAFIWQKDGVKKLNLYLIINYFKGGKLRFKKVKPEAFEANRFYTVINKKSGEIVPMEVNFNFDDPNLIILPLAFGKRQGREFIWNDLLSLETGSLKLANGRVIEKTLYNRRTRQDEPALFVALTFERREVLDSSNIKPMNLIGIDRGENIPAVIALTDPEGCPLSRFKDSLGNPTHILRIGESYKEKQRTIQAAKEVEQRRAGGYSRKYASKAKNLADDMVRNTARDLLYYAVTQDAMLIFENLSRGFGRQGKRTFMAERQYTRMEDWLTAKLAYEGLPSKTYLSKTLAQYTSKTCSNCGFTITSADYDRVLEKLKKTATGWMTTINGKELKVEGQITYYNRYKRQNVVKDLSVELDRLSEESVNNDISSWTKGRSGEALSLLKKRFSHRPVQEKFVCLNCGFETHADEQAALNIARSWLFLRSQEYKKYQTNKTTGNTDKRAFVETWQSFYRKKLKEVWKPAV

SEQ ID NO: 952 - protein, 978 aa, synthetic construct
  REGION 1..978: note = CasX protein variant
MQEIKRINKIRRRLVKDSNTKKAGKTGPMKTLLVRVMTPDLRERLENLRKKPENIPQPISNTSRANLNKLLTDYTEMKKAILHVYWEEFQKDPVGLMSRVAQPAPKNIDQRKLIPVKDGNERLTSSGFACSQCCQPLYVYKLEQVNDKGKPHTNYFGRCNVSEHERLILLSPHKPEANDELVTYSLGEFGQRALDFYSIHVTRESNHPVKPLEQIGGNSCASGPVGKALSDACMGAVASFLTKYQDIILEHQKVIKKNEKRLANLKDIASANGLAFPKITLPPQPHTKEGIEAYNNVVAQIVIWVNLNLWQKLKIGRDEAKPLQRLKGFPSFPLVERQANEVDWWDMVCNVKKLINEKKEDGKVFWQNLAGYKRQEALLPYLSSEEDRKKGKKFARYQFGDLLLHLEKKHGEDWGKVYDEAWERIDKKVEGLSKHIKLEEERRSEDAQSKAALTDWLRAKASFVIEGLKEADKDEFCRCELKLQKWYGDLRGKPFAIEAENSILDISGFSKQYNCAFIWQKDGVKKLNLYLIINYFKGGKLRFKKIKPEAFEANRFYTVINKKSGEIVPMEVNFNFDDPNLIILPLAFGKRQGREFIWNDLLSLETGSLKLANGRVIEKTLYNRRTRQDEPALFVALTFERREVLDSSNIKPMNLIGIDRGENIPAVIALTDPEGCPLSRFKDSLGNPTHILRIGESYKEKQRTIQAAKEVEQRRAGGYSRKYASKAKNLADDMVRNTARDLLYYAVTQDAMLIFENLSRGFGRQGKRTFMAERQYTRMEDWLTAKLAYEGLPSKTYLSKTLAQYTSKTCSNCGFTITSADYDRVLEKLKKTATGWMTTINGKELKVEGQITYYNRYKRQNVVKDLSVELDRLSEESVNNDISSWTKGRSGEALSLLKKRFSHRPVQEKFVCLNCGFETHADEQAALNIARSWLFLRSQEYKKYQTNKTTGNTDKRAFVETWQSFYRKKLKEVWKPAV

SEQ ID NO: 953 - protein, 978 aa, synthetic construct
  REGION 1..978: note = CasX protein variant
MQEIKRINKIRRRLVKDSNTKKAGKTGPMKTLLVRVMTPDLRERLENLRKKPENIPQPISNTSRANLNKLLTDYTEMKKAILHVYWEEFQKDPVGLMSRVAQPAPKNIDQRKLIPVKDGNERLTSSGFACSQCCQPLYVYKLEQVNDKGKPHTNYFGRCNVSEHERLILLSPHKPEANDELVTYSLGKFGQRALDFYSIHVTRESNHPVKPLEQIGGNSCASGPVGKALSDACMGAVASFLTKYQDIILEHQKVIKKNEKRLANLKDIASANGLAFPKITLPPQPHTKEGIEAYNNVVAQIVIWVNLNLWQKLKIGRDEAKPLQRLKGFPSFPLVERQANEVDWWDMVCNVKKLINEKKEDGKVFWQNLAGYKRQEALLPYLSSEEDRKKGKKFARYQFGDLLLHLEKKHGEDWGKVYDEAWERIDKKVEGLSKHIKLEEERRSEDAQSKAALTDWLRAKASFVIEGLKEADKDEFCRCELKLQKWYGDLRGKPFAIEAENSILDISGFSKQYNCAFIWQKDGVKKLNLYLIINYFKGGKLRFKKIKPEAFEANRFYTVINKKSGEIVPMEVNFNFDDPNLIILPLAFGKRQGREFIWNDLLSLETGSLKLANGRVIEKTLYNRRTRQDEPALFVALTFERREVLDSSNIKPMNLIGIDRGENIPAVIALTDPEGCPLSRFKDSLGNPTHILRIGESYKEKQRTIQAAKEVEQRRAGGYSRKYASKAKNLADDMVRNTARDLLYYAVTQDAMLIFENLSRGFGRQGKRTFMAERQYTRMEDWLTAKLATEGLPSKTYLSKTLAQYTSKTCSNCGFTITSADYDRVLEKLKKTATGWMTTINGKELKVEGQITYYNRYKRQNVVKDLSVELDRLSEESVNNDISSWTKGRSGEALSLLKKRFSHRPVQEKFVCLNCGFETHADEQAALNIARSWLFLRSQEYKKYQTNKTTGNTDKRAFVETWQSFYRKKLKEVWKPAV

SEQ ID NO: 954 - protein, 978 aa, synthetic construct
  REGION 1..978: note = CasX protein variant
MQEIKRINKIRRRLVKDSNTKKAGKTGPMKTLLVRVMTPDLRERLENLRKKPENIPQPISNTSRANLNKLLTDYTEMKKAILHVYWEEFQKDPVGLMSRVAQPAPKNIDQRKLIPVKDGNERLTSSGFACSQCCQPLYVYKLEQVNDKGKPHTNYFGRCNVSEHERLILLSPHKPEANDELVTYSLGKFGQRALDFYSIHVTRESNHPVKPLEQIGGNSCASGPVGKALSDACMGAVASFLTKYQDIILEHQKVIKKNEKRLANLKDIASANGLAFPKITLPPQPHTKEGIEAYNNVVAQIVIWVNLNLWQKLKIGRDEAKPLQRLKGFPSFPLVERQANEVDWWDMVCNVKKLINEKKEDGKVFWQNLAGYKRQEALLPYLSSEEDRKKGKKFARYQFGDLLLHLEKKHGEDWGKVYDEAWERIDKKVEGLSKHIKLEEERRSEDAQSKAALTDWLRAKASFVIEGLKEADKDEFCRCELKLQKWYGDLRGKPSAIEAENSILDISGFSKQYNCAFIWQKDGVKKLNLYLIINYFKGGKLRFKKIKPEAFEANRFYTVINKKSGEIVPMEVNFNFDDPNLIILPLAFGKRQGREFIWNDLLSLETGSLKLANGRVIEKTLYNRRTRQDEPALFVALTFERREVLDSSNIKPMNLIGIDRGENIPAVIALTDPEGCPLSRFKDSLGNPTHILRIGESYKEKQRTIQAAKEVEQRRAGGYSRKYASKAKNLADDMVRNTARDLLYYAVTQDAMLIFENLSRGFGRQGKRTFMAERQYTRMEDWLTAKLAYEGLPSKTYLSKTLAQYTSKTCSNCGFTITSADYDRVLEKLKKTATGWMTTINGKELKVEGQITYYNRYKRQNVVKDLSVELDRLSEESVNNDISSWTKGRSGEALSLLKKRFSHRPVQEKFVCLNCGFETHADEQAALNIARSWLFLRSQEYKKYQTNKTTGNTDKRAFVETWQSFYRKKLKEVWKPAV

SEQ ID NO: 955 - protein, 978 aa, synthetic construct
  REGION 1..978: note = CasX protein variant
MQEIKRINKIRRRLVKDSNTKKAGKTGPEKTLLVRVMTPDLRERLENLRKKPENIPQPISNTSRANLNKLLTDYTEMKKAILHVYWEEFQKDPVGLMSRVAQPAPKNIDQRKLIPVKDGNERLTSSGFACSQCCQPLYVYKLEQVNDKGKPHTNYFGRCNVSEHERLILLSPHKPEANDELVTYSLGKFGQRALDFYSIHVTRESNHPVKPLEQIGGNSCASGPVGKALSDACMGAVASFLTKYQDIILEHQKVIKKNEKRLANLKDIASANGLAFPKITLPPQPHTKEGIEAYNNVVAQIVIWVNLNLWQKLKIGRDEAKPLQRLKGFPSFPLVERQANEVDWWDMVCNVKKLINEKKEDGKVFWQNLAGYKRQEALLPYLSSEEDRKKGKKFARYQFGDLLLHLEKKHGEDWGKVYDEAWERIDKKVEGLSKHIKLEEERRSEDAQSKAALTDWLRAKASFVIEGLKEADKDEFCRCELKLQKWYGDLRGKPFAIEAENSILDISGFSKQYNCAFIWQKDGVKKLNLYLIINYFKGGKLRFKKIKPEAFEANRFYTVINKKSGEIVPMEVNFNFDDPNLIILPLAFGKRQGREFIWNDLLSLETGSLKLANGRVIEKTLYNRRTRQDEPALFVALTFERREVLDSSNIKPMNLIGIDRGENIPAVIALTDPEGCPLSRFKDSLGNPTHILRIGESYKEKQRTIQAAKEVEQRRAGGYSRKYASKAKNLADDMVRNTARDLLYYAVTQDAMLIFENLSRGFGRQGKRTFMAERQYTRMEDWLTAKLAYEGLPSKTYLSKTLAQYTSKTCSNCGFTITSADYDRVLEKLKKTATGWMTTINGKELKVEGQITYYNRYKRQNVVKDLSVELDRLSEESVNNDISSWTKGRSGEALSLLKKRFSHRPVQEKFVCLNCGFETHADEQAALNIARSWLFLRSQEYKKYQTNKTTGNTDKRAFVETWQSFYRKKLKEVWKPAV

SEQ ID NO: 956 - protein, 978 aa, synthetic construct
  REGION 1..978: note = CasX protein variant
MQEIKRINKIRRRLVKDSNTKKAGKTGPMKTLLVRVMTPDLRERLENLRKKPENIPQPISNTSRANLNKLLTDYTEMKKAILHVYWEEFQKDPVGLMSRVAQPAPKNIDQRKLIPVKDGNERLTSSGFACSQCCQPLYVYKLEQVNDKGKPHTNYFGRCNVSEHERLILLSPHKPEANDELVTYSLGKFGQRALDFYSIHVTRESNHPVKPLEQIGGNSCASGPVGKALSDACMGAVTSFLTKYQDIILEHQKVIKKNEKRLANLKDIASANGLAFPKITLPPQPHTKEGIEAYNNVVAQIVIWVNLNLWQKLKIGRDEAKPLQRLKGFPSFPLVERQANEVDWWDMVCNVKKLINEKKEDGKVFWQNLAGYKRQEALLPYLSSEEDRKKGKKFARYQFGDLLLHLEKKHGEDWGKVYDEAWERIDKKVEGLSKHIKLEEERRSEDAQSKAALTDWLRAKASFVIEGLKEADKDEFCRCELKLQKWYGDLRGKPFAIEAENSILDISGFSKQYNCAFIWQKDGVKKLNLYLIINYFKGGKLRFKKIKPEAFEANRFYTVINKKSGEIVPMEVNFNFDDPNLIILPLAFGKRQGREFIWNDLLSLETGSLKLANGRVIEKTLYNRRTRQDEPALFVALTFERREVLDSSNIKPMNLIGIDRGENIPAVIALTDPEGCPLSRFKDSLGNPTHILRIGESYKEKQRTIQAAKEVEQRRAGGYSRKYASKAKNLADDMVRNTARDLLYYAVTQDAMLIFENLSRGFGRQGKRTFMAERQYTRMEDWLTAKLAYEGLPSKTYLSKTLAQYTSKTCSNCGFTITSADYDRVLEKLKKTATGWMTTINGKELKVEGQITYYNRYKRQNVVKDLSVELDRLSEESVNNDISSWTKGRSGEALSLLKKRFSHRPVQEKFVCLNCGFETHADEQAALNIARSWLFLRSQEYKKYQTNKTTGNTDKRAFVETWQSFYRKKLKEVWKPAV

SEQ ID NO: 957 - protein, 978 aa, synthetic construct
  REGION 1..978: note = CasX protein variant
MQEIKRINKIRRRLVKDSNTKKAGKTGPMKTLLVRVMTPDLRERLENLRKKPENIPQPISNTSRANLNKLLTDYTEMKKAILHVYWEEFQKDPVGLMSRVAQPAPKNIDQRKLIPVKDGNERLTSSGFACSQCCQPLYVYKLEQVNDKGKPHTNYFGRCNVSEHERLILLSPHKPEANDELVTYSLGKFGQRALDFYSIHVTRESNHPVKPLEQIGGNSCASGPVGKALSNACMGAVASFLTKYQDIILEHQKVIKKNEKRLANLKDIASANGLAFPKITLPPQPHTKEGIEAYNNVVAQIVIWVNLNLWQKLKIGRDEAKPLQRLKGFPSFPLVERQANEVDWWDMVCNVKKLINEKKEDGKVFWQNLAGYKRQEALLPYLSSEEDRKKGKKFARYQFGDLLLHLEKKHGEDWGKVYDEAWERIDKKVEGLSKHIKLEEERRSEDAQSKAALTDWLRAKASFVIEGLKEADKDEFCRCELKLQKWYGDLRGKPFAIEAENSILDISGFSKQYNCAFIWQKDGVKKLNLYLIINYFKGGKLRFKKIKPEAFEANRFYTVINKKSGEIVPMEVNFNFDDPNLIILPLAFGKRQGREFIWNDLLSLETGSLKLANGRVIEKTLYNRRTRQDEPALFVALTFERREVLDSSNIKPMNLIGIDRGENIPAVIALTDPEGCPLSRFKDSLGNPTHILRIGESYKEKQRTIQAAKEVEQRRAGGYSRKYASKAKNLADDMVRNTARDLLYYAVTQDAMLIFENLSRGFGRQGKRTFMAERQYTRMEDWLTAKLAYEGLPSKTYLSKTLAQYTSKTCSNCGFTITSADYDRVLEKLKKTATGWMTTINGKELKVEGQITYYNRYKRQNVVKDLSVELDRLSEESVNNDISSWTKGRSGEALSLLKKRFSHRPVQEKFVCLNCGFETHADEQAALNIARSWLFLRSQEYKKYQTNKTTGNTDKRAFVETWQSFYRKKLKEVWKPAV

SEQ ID NO: 958 - protein, 978 aa, synthetic construct
  REGION 1..978: note = CasX protein variant
MQEIKRINKIRRRLVKDSNTKKAGKTGPMKTLLVRVMTPDLRERLENLRKKPENIPQPISNTSRANLNKLLTDYTEMKKAILHVYWEEFQKDPVGLMSRVAQPAPKNIDQRKLIPVKDGNERLTSSGFACSQCCQPLYVYKLEQVNDKGKPHTNYFGRCNVSEHERLILLSPHKPEANDELVTYSLGKFGQRALDFYSFHVTRESNHPVKPLEQIGGNSCASGPVGKALSDACMGAVASFLTKYQDIILEHQKVIKKNEKRLANLKDIASANGLAFPKITLPPQPHTKEGIEAYNNVVAQIVIWVNLNLWQKLKIGRDEAKPLQRLKGFPSFPLVERQANEVDWWDMVCNVKKLINEKKEDGKVFWQNLAGYKRQEALLPYLSSEEDRKKGKKFARYQFGDLLLHLEKKHGEDWGKVYDEAWERIDKKVEGLSKHIKLEEERRSEDAQSKAALTDWLRAKASFVIEGLKEADKDEFCRCELKLQKWYGDLRGKPFAIEAENSILDISGFSKQYNCAFIWQKDGVKKLNLYLIINYFKGGKLRFKKIKPEAFEANRFYTVINKKSGEIVPMEVNFNFDDPNLIILPLAFGKRQGREFIWNDLLSLETGSLKLANGRVIEKTLYNRRTRQDEPALFVALTFERREVLDSSNIKPMNLIGIDRGENIPAVIALTDPEGCPLSRFKDSLGNPTHILRIGESYKEKQRTIQAAKEVEQRRAGGYSRKYASKAKNLADDMVRNTARDLLYYAVTQDAMLIFENLSRGFGRQGKRTFMAERQYTRMEDWLTAKLAYEGLPSKTYLSKTLAQYTSKTCSNCGFTITSADYDRVLEKLKKTATGWMTTINGKELKVEGQITYYNRYKRQNVVKDLSVELDRLSEESVNNDISSWTKGRSGEALSLLKKRFSHRPVQEKFVCLNCGFETHADEQAALNIARSWLFLRSQEYKKYQTNKTTGNTDKRAFVETWQSFYRKKLKEVWKPAV

SEQ ID NO: 959 - protein, 978 aa, synthetic construct
  REGION 1..978: note = CasX protein variant
MQEIKRINKIRRRLVKDSNTKKAGKTGPMKTLLVRVMTPDLRERLENLRKKPENIPQPISNTSRANLNKLLTDYTEMKKAILHVYWEEFQKDPVGLMSRVAQPAPKNIDQRKLIPVKDGNERLTSSGFACSQCCQPLYVYKLEQVNDKGKPHTNYFGRCNVSEHERLILLSPHKPEANDELVTYSLGKFGQRALDFYSIHVTRESNHPVKPLEQIGGNSCASGPVGKALSDACMGAVASFLTKYQDIILEHQKVIKKNEKRLANLKDIASANGLAFPKITLPPQPHTKEGIEAYNNVVAQIVIWVNLNLWQKLKIGRDEAKPLQRLKGFPSFPLVERQANEVDWWDMVCNVKKLINEKKEDGKVFWQNLAGYKRQEALLPYLSSEEDRKKGKKFARYQFGDLLLHLEKKHGEDWGKVYDEAWERIDKKVEGLSKHIKLEEERRSEDAQSKAALTDWLRAKASFVIEGLKEADKDEFCRCELKLQKWYGDLRGKPFAIEAENSILDISGFSKQYNCAFIWQKDGVKKLNLYLIINYFKGGKLRFKKIKPEAFEANRFYTVINKKSGEIVPMEVNFNFDDPNLIILPLAFGKRQGREFIWNDLLSLETGSLKLANGRVIEKTLYNRRTRQDEPALFVALTFERREVLDSSNIKPMNLIGIDRGENIPAVIALTDPEGCPLSRFKDSLGNPTHILRIGESYKEKQRTIQAAKEVEQRRAGGYSRKYASKAKNLADDMVRSTARDLLYYAVTQDAMLIFENLSRGFGRQGKRTFMAERQYTRMEDWLTAKLAYEGLPSKTYLSKTLAQYTSKTCSNCGFTITSADYDRVLEKLKKTATGWMTTINGKELKVEGQITYYNRYKRQNVVKDLSVELDRLSEESVNNDISSWTKGRSGEALSLLKKRFSHRPVQEKFVCLNCGFETHADEQAALNIARSWLFLRSQEYKKYQTNKTTGNTDKRAFVETWQSFYRKKLKEVWKPAV

SEQ ID NO: 960 - protein, 979 aa, synthetic construct
  REGION 1..979: note = CasX protein variant
MQEIKRINKIRRRLVKDSNTKKAGKTGPMKTLLVRVMTPDLRERLENLRKKPENIPQPISNTSRANLNKLLTDYTEMKKAILHVYWEEFQKDPVGLMSRVAQPAPKNIDQRKLIPVKDGNERLTSSGFACSQCCQPLYVYKLEQVNDKGKPHTNYFGRCNVSEHERLILLSPHKPEANDELVTYSLGKFGQRALDFYSIHVTRESNHPVKPLEQIGGNSCASGPVGKALSDACMGAVASFLTKYQDIILEHQKVIKKNEKRLANLKDIASANGLAFPKITLPPQPHTKEGIEAYNNVVAQIVIWVNLNLWQKLKIGRDEAKPLQRLKGFPSFPLVERQANEVDWWDMVCNVKKLINEKKEDGKVFWQNLAGYKRQEALLPYLSSEEDRKKGKKFARYQFGDLLLHLEKKHGEDWGKVYDEAWERIDKKVEGLSKHIKLEEERRSEDAQSKAALTDWLRAKASFVIEGLKEADKDEFCRCELKLQKWYGDLRGKPFAIEAENSILDISGFSKQYNCAFIWQKDGVKKLNLYLIINYFKGGKLRFKKIKPEAFEANRFYTVINKKSGEIVPMEVNFNFDDPNLIILPLAFGKRQGREFIWNDLLSLETGSLKLANGRVIEKTLYNRRTRQDEPALFVALTFERREVLDSSNIKPMNLIGIDRAGENIPAVIALTDPEGCPLSRFKDSLGNPTHILRIGESYKEKQRTIQAAKEVEQRRAGGYSRKYASKAKNLADDMVRNTARDLLYYAVTQDAMLIFENLSRGFGRQGKRTFMAERQYTRMEDWLTAKLAYEGLPSKTYLSKTLAQYTSKTCSNCGFTITSADYDRVLEKLKKTATGWMTTINGKELKVEGQITYYNRYKRQNVVKDLSVELDRLSEESVNNDISSWTKGRSGEALSLLKKRFSHRPVQEKFVCLNCGFETHADEQAALNIARSWLFLRSQEYKKYQTNKTTGNTDKRAFVETWQSFYRKKLKEVWKPAV

SEQ ID NO: 961 - protein, 978 aa, synthetic construct
  REGION 1..978: note = CasX protein variant
MQEIKRINKIRRRLVKDSNTKKAGKTGPMKTLLVRVMTPDLRERLENLRKKPENIPQPISNTSRANLNKLLTDYTEMKKAILHVYWEEFQKDPVGLMSRVAQPAPKNIDQRKLIPVKDGNERLTSSGFACSQCCQPLYVYKLEQVNDKGKPHTNYFGRCNVSEHERLILLSPHKPEANDELVTYSLGKFGQRALDFYSIHVTRESNHPVKPLEQIGGNSCASGPVGKALSDACMGAVASFLTKYQDIILEHQKVIKKNEKRLANLKDIASANGLAFPKITLPPQPHTKEGIEAYNNVVAQIVIWVNLNLWQKLKIGRDEAKPLQRLKGFPSFPLVERQANEVDWWDMVCNVKKLINEKKEDGKVFWQNLAGYKRQEALLPYLSSEEDRKKGKKFARYQFGDLLLHLEKKHGEDWGKVYDEAWERIDKKVEGLSKHIKLEEERRSEDAQSKAALTDWLRANASFVIEGLKEADKDEFCRCELKLQKWYGDLRGKPFAIEAENSILDISGFSKQYNCAFIWQKDGVKKLNLYLIINYFKGGKLRFKKIKPEAFEANRFYTVINKKSGEIVPMEVNFNFDDPNLIILPLAFGKRQGREFIWNDLLSLETGSLKLANGRVIEKTLYNRRTRQDEPALFVALTFERREVLDSSNIKPMNLIGIDRGENIPAVIALTDPEGCPLSRFKDSLGNPTHILRIGESYKEKQRTIQAAKEVEQRRAGGYSRKYASKAKNLADDMVRNTARDLLYYAVTQDAMLIFENLSRGFGRQGKRTFMAERQYTRMEDWLTAKLAYEGLPSKTYLSKTLAQYTSKTCSNCGFTITSADYDRVLEKLKKTATGWMTTINGKELKVEGQITYYNRYKRQNVVKDLSVELDRLSEESVNNDISSWTKGRSGEALSLLKKRFSHRPVQEKFVCLNCGFETHADEQAALNIARSWLFLRSQEYKKYQTNKTTGNTDKRAFVETWQSFYRKKLKEVWKPAV

SEQ ID NO: 962 - protein, 978 aa, synthetic construct
  REGION 1..978: note = CasX protein variant
MQEIKRINKIRRRLVKDSNTKKAGKTGPMKTLLVRVMTPDLRERLENLRKKPENIPQPISNTSRANLNKLLTDYTEMKKAILHVYWEEFQKDPVGLMSRVAQPAPKNIDQRKLIPVKDGNERLTSSGFACSQCCQPLYVYKLEQVNDKGKPHTNYFGRCNVSEHERLILLSPHKPEANDELVTYSLGKFGQRALDFYSIHVTRESNHPVRPLEQIGGNSCASGPVGKALSDACMGAVASFLTKYQDIILEHQKVIKKNEKRLANLKDIASANGLAFPKITLPPQPHTKEGIEAYNNVVAQIVIWVNLNLWQKLKIGRDEAKPLQRLKGFPSFPLVERQANEVDWWDMVCNVKKLINEKKEDGKVFWQNLAGYKRQEALLPYLSSEEDRKKGKKFARYQFGDLLLHLEKKHGEDWGKVYDEAWERIDKKVEGLSKHIKLEEERRSEDAQSKAALTDWLRAKASFVIEGLKEADKDEFCRCELKLQKWYGDLRGKPFAIEAENSILDISGFSKQYNCAFIWQKDGVKKLNLYLIINYFKGGKLRFKKIKPEAFEANRFYTVINKKSGEIVPMEVNFNFDDPNLIILPLAFGKRQGREFIWNDLLSLETGSLKLANGRVIEKTLYNRRTRQDEPALFVALTFERREVLDSSNIKPMNLIGIDRGENIPAVIALTDPEGCPLSRFKDSLGNPTHILRIGESYKEKQRTIQAAKEVEQRRAGGYSRKYASKAKNLADDMVRNTARDLLYYAVTQDAMLIFENLSRGFGRQGKRTFMAERQYTRMEDWLTAKLAYEGLPSKTYLSKTLAQYTSKTCSNCGFTITSADYDRVLEKLKKTATGWMTTINGKELKVEGQITYYNRYKRQNVVKDLSVELDRLSEESVNNDISSWTKGRSGEALSLLKKRFSHRPVQEKFVCLNCGFETHADEQAALNIARSWLFLRSQEYKKYQTNKTTGNTDKRAFVETWQSFYRKKLKEVWKPAV

SEQ ID NO: 963 - protein, 978 aa, synthetic construct
  REGION 1..978: note = CasX protein variant
MQEIKRINKIRRRLVKDSNTKKAGKTGPMKTLLVRVMTPDLRERLENLRKKPENIPQPISNTSRANLNKLLTDYTEMKKAILHVYWEEFQKDPVGLMSRVAQPAPKNIDQRKLIPVKDGNERLTSSGFACSQCCQPLYVYKLEQVNDKGKPHTNYFGRCNVSEHERLILLSPHKPEANDELVTYSLGKFGQRALDFYSIHVTRESNHPVKPLEQIGGNSCASGPVGKALSDACMGAVASFLTKYQDIILEHQKVIKKNEKRLANLKDIASANGLAFPKITLPPQPHTKEGIEAYNNVVAQIVIWVNLNLWQKLKIGRDEAKPLQRLKGFPSFPLVERQANEVDWWDMVCNVKKLINEKKEDGKVFWQNLAGYKRQEALLPYLSSEEDRKKGKKFARYQFGDLLLHLEKKHGEDWGKVYDEAWERIDKKVEGLSKHIKLEEERRSEDAQSKAALTDWLRAKASFVIEGLKEADKDEFCRCELKLQKWYGDLRPKPFAIEAENSILDISGFSKQYNCAFIWQKDGVKKLNLYLIINYFKGGKLRFKKIKPEAFEANRFYTVINKKSGEIVPMEVNFNFDDPNLIILPLAFGKRQGREFIWNDLLSLETGSLKLANGRVIEKTLYNRRTRQDEPALFVALTFERREVLDSSNIKPMNLIGIDRGENIPAVIALTDPEGCPLSRFKDSLGNPTHILRIGESYKEKQRTIQAAKEVEQRRAGGYSRKYASKAKNLADDMVRNTARDLLYYAVTQDAMLIFENLSRGFGRQGKRTFMAERQYTRMEDWLTAKLAYEGLPSKTYLSKTLAQYTSKTCSNCGFTITSADYDRVLEKLKKTATGWMTTINGKELKVEGQITYYNRYKRQNVVKDLSVELDRLSEESVNNDISSWTKGRSGEALSLLKKRFSHRPVQEKFVCLNCGFETHADEQAALNIARSWLFLRSQEYKKYQTNKTTGNTDKRAFVETWQSFYRKKLKEVWKPAV

SEQ ID NO: 964 - protein, 978 aa, synthetic construct
  REGION 1..978: note = CasX protein variant
MQEIKRINKIRRRLVKDSNTKKAGKTGPMKTLLVRVMTPDLRERLENLRKKPENIPQPISNTSRANLNKLLTDYTEMKKAILHVYWEEFQKDPVGLMSRVAQPAPKNIDQRKLIPVKDGNERLTSSGFACSQCCQPLYVYKLEQVNDKGKPHTNYFGRCNVSEHERLILLSPHKPEANDELVTYSLGKFGQRALDFYSIHVTRESNHPVKPLEQIGGNSCASGPVGKALSDACMGAVASFLTKYQDIILEHQKVIKKNEKRLANLKDIASANGLAFPKITLPPQPHTKEGIEAYNNVVAQIVIWVNLNLWQKLKIGRDEAKPLQRLKGFPSFPLVERQANEVDWWDMVCNVKKLINEKKEDGKVFWQNLAGYKRQEALLPYLSSEEDRKKGKKFARYQFGDLLLHLEKKHGEDWGKVYDEAWERIDKKVEGLSKHIKLEEERRSEDAQSKAALTDWLRAKASFVIEGLKEADKDEFCRCELKLQKWYGDLRGKPFAIEAENSILDISGFSKQYNCAFIWQKDGVKKLNLYLIINYFKGGKLRFKKIKPEAFEANRFYTVINKKSGEIVPMEVNFNFDDPNLIILPLAFGKIQGREFIWNDLLSLETGSLKLANGRVIEKTLYNRRTRQDEPALFVALTFERREVLDSSNIKPMNLIGIDRGENIPAVIALTDPEGCPLSRFKDSLGNPTHILRIGESYKEKQRTIQAAKEVEQRRAGGYSRKYASKAKNLADDMVRNTARDLLYYAVTQDAMLIFENLSRGFGRQGKRTFMAERQYTRMEDWLTAKLAYEGLPSKTYLSKTLAQYTSKTCSNCGFTITSADYDRVLEKLKKTATGWMTTINGKELKVEGQITYYNRYKRQNVVKDLSVELDRLSEESVNNDISSWTKGRSGEALSLLKKRFSHRPVQEKFVCLNCGFETHADEQAALNIARSWLFLRSQEYKKYQTNKTTGNTDKRAFVETWQSFYRKKLKEVWKPAV

SEQ ID NO: 965 - protein, 979 aa, synthetic construct
  REGION 1..979: note = CasX protein variant
MQEIKRINKIRRRLVKDSNTKKAGKTGPMKTLLVRVMTPDLRERLENLRKKPENIPQPISNTSRANLNKLLTDYTEMKKAILHVYWEEFQKDPVGLMSRVAQPAPKNIDQRKLIPVKDGNERLTSSGFACSQCCQPLYVYKLEQVNDKGKPHTNYFGRCNVSEHERLILLSPHKPEANDELVTYSLGKFGQRALDFYSIHVTRESNHPVKPLEQIGGNSCASGPVGKALSDACMGAVASFLTKYQDIILEHQKVIKKNEKRLANLKDIASANGLAFPKITLPPQPHTKEGIEAYNNVVAQIVIWVNLNLWQKLKIGRDEAKPLQRLKGFPSFPLVERQANEVDWWDMVCNVKKLINEKKEDGKVFWQNLAGYKRQEALLPYLSSEEDRKKGKKFARYQFGDLLLHLEKKHGEDWGKVYDEAWERIDKKVEGLSKHIKLEEERRSEDAQSKAALTDWLRAKASFVIEGLKEADKDEFCRCELKLQKWYGDLRGKPFAIEAENSILDISGFSKQYNCAFIWQKDGVKKLNLYLIINYFKGGKLRFKKIKPEAFEANRFYTVINKKSGEIVPMEVNFNFDDPNLIILPLAFGKRQGREFIWNDLLSLETGSLKLANGRVIEKTLYNRRTRQDEPALFVALTFERREVLDSSNIKPMNLIGIDRGENIPAVIALTDPEGCPLSRFKDSLGNPTHILRIGTESYKEKQRTIQAAKEVEQRRAGGYSRKYASKAKNLADDMVRNTARDLLYYAVTQDAMLIFENLSRGFGRQGKRTFMAERQYTRMEDWLTAKLAYEGLPSKTYLSKTLAQYTSKTCSNCGFTITSADYDRVLEKLKKTATGWMTTINGKELKVEGQITYYNRYKRQNVVKDLSVELDRLSEESVNNDISSWTKGRSGEALSLLKKRFSHRPVQEKFVCLNCGFETHADEQAALNIARSWLFLRSQEYKKYQTNKTTGNTDKRAFVETWQSFYRKKLKEVWKPAV

SEQ ID NO: 966 - protein, 978 aa, synthetic construct
  REGION 1..978: note = CasX protein variant
MQEIKRINKIRRRLVKDSNTKKAGKTGPMKTLLVRVMTPDLRERLENLRKKPENIPQPISNTSRANLNKLLTDYTEMKKAILHVYWEEFQKDPVGLMSRVAQPAPKNIDQRKLIPVKDGNERLTSSGFACSQCCQPLYVYKLEQVNDKGKPHTNYFGRCNVSEHERLILLSPHKPEANDELVTYSLGKFGQRALDFYSIHVTRESNHPVKPLEQIGGNSCASGPVGKALSDACMGAVASFLTKYQDIILEHQKVIKKNEKRLANLKDIASANGLAFPKITLPPQPHTKEGIEAYNNVVAQIVIWVNLNLWQKLKIGRDEAKPLQRLKGFPSFPLVERQANEVDWWDMVCNVKKLINEKKEDGKVFWQNLAGYKRQEALLPYLSSEEDRKKGKKFARYQFGDLLLHLEKKHGEDWGKVYDEAWERIDKKVEGLSKHIKLEEERRSEDAQSKAALTDWLRAKASFVIEGLKEADKDEFCRCELKLQKWYGDLRGKPFAIEAENSILDIGRFSKQYNCAFIWQKDGVKKLNLYLIINYFKGGKLRFKKIKPEAFEANRFYTVINKKSGEIVPMEVNFNFDDPNLIILPLAFGKRQGREFIWNDLLSLETGSLKLANGRVIEKTLYNRRTRQDEPALFVALTFERREVLDSSNIKPMNLIGIDRGENIPAVIALTDPEGCPLSRFKDSLGNPTHILRIGESYKEKQRTIQAAKEVEQRRAGGYSRKYASKAKNLADDMVRNTARDLLYYAVTQDAMLIFENLSRGFGRQGKRTFMAERQYTRMEDWLTAKLAYEGLPSKTYLSKTLAQYTSKTCSNCGFTITSADYDRVLEKLKKTATGWMTTINGKELKVEGQITYYNRYKRQNVVKDLSVELDRLSEESVNNDISSWTKGRSGEALSLLKKRFSHRPVQEKFVCLNCGFETHADEQAALNIARSWLFLRSQEYKKYQTNKTTGNTDKRAFVETWQSFYRKKLKEVWKPAV

SEQ ID NO: 967 - protein, 978 aa, synthetic construct
  REGION 1..978: note = CasX protein variant
MQEIKRINKIRRRLVKDSNTKKAGKTGPMKTLLVRVMTPDLRERLENLRKKPENIPQPISNTSRANLNKLLTDYTEMKKAILHVYWEEFQKDPVGLMSRVAQPAPKNIDQRKLIPVKDGNERLTSSGFACSQCCQPLYVYKLEQVNDKGKPHTNYFGRCNVSEHERLILLSPHKPEANDELVTYSLGKFGQRALDFYSIHVTRESNHPVKPLEQIGGNSCASGPVGKALSDACMGAVASFLTKYQDIILEHQKVIKKNEKRLANLKDIASANGLAFPKITLPPQPHTKEGIEAYNNVVAQIVIWVNLNLWQKLKIGRDEAKPLQRLKGFPSFPLVERQANEVDWWDMVCNVKKLINEKKEDGKVFWQNLAGYKRQEALLPYLSSEEDRKKGKKFARYQFGDLLLHLEKKHGEDWGKVYDEAWERIDKKVEGLSKHIKLEEERRSEDAQSKAALTDWLRAKASFVIEGLKEADKDEFCRCELKLQKWYGDLRGKPFAIEAENSILDISGFSKQYNCAFIWQKDGVKKLNLYLIINYFKGGKLRFKKIKPEAFEANRFYTVINKKSGEIVPMEVNFNFDDPNLIILPLAFGKRQGREFIWNDLLSLETGSLKLANGRVIEKTLYNRRTRQDEPALFVALTFERREVLDSSNIKPMNLIGIDRGENIPAVIALTDPEGCPLSRFKDSLGNPTHILRIGESYKEKQRTIQAAKEVEQRRAGGYSRKNASKAKNLADDMVRNTARDLLYYAVTQDAMLIFENLSRGFGRQGKRTFMAERQYTRMEDWLTAKLAYEGLPSKTYLSKTLAQYTSKTCSNCGFTITSADYDRVLEKLKKTATGWMTTINGKELKVEGQITYYNRYKRQNVVKDLSVELDRLSEESVNNDISSWTKGRSGEALSLLKKRFSHRPVQEKFVCLNCGFETHADEQAALNIARSWLFLRSQEYKKYQTNKTTGNTDKRAFVETWQSFYRKKLKEVWKPAV

SEQ ID NO: 968 - protein, 979 aa, synthetic construct
  REGION 1..979: note = CasX protein variant
MQEIKRINKIRRRLVKDSNTKKAGKTGPMKTLLVRVMTPDLRERLENLRKKPENIPQPISNTSRANLNKLLTDYTEMKKAILHVYWEEFQKDPVGLMSRVAQPAPKNIDQRKLIPVKDGNERLTSSGFACSQCCQPLYVYKLEQVNDKGKPHTNYFGRCNVSEHERLILLSPHKPEANDELVTYSLGKFGQRALDFYSIHVTRESNHPVKPLEQIGGNSCASGPVGKALSDACMGAVASFLTKYQDIILEHQKVIKKNEKRLANLKDIASANGLAFPKITLPPQPHTKEGIEAYNNVVAQIVIWVNLNLWQKLKIGRDEAKPLQRLKGFPSFPLVERQANEVDWWDMVCNVKKLINEKKEDGKVFWQNLAGYKRQEALLPYLSSEEDRKKGKKFARYQFGDLLLHLEKKHGEDWGKVYDEAWERIDKKVEGLSKHIKLEEERRSEDAQSKAALTDWLRAKASFVIEGLKEADKDEFCRCELKLQKWYGDLRGKPFAIEAENSILDISGFSKQYNCAFIWQKDGVKKLNLYLIINYFKGGKLRFKKIKPEAFEANRFYTVINKKSGEIVPMEVNFNFDDPNLIILPLAFGKRQGREFIWNDLLSLETGSLKLANGRVIEKTLYNRRTRQDEPALFVALTFERREVLDSSNIKPMNLIGIDRGENIPAVIALTDPEGCPLSRFKDSLGNPTHILRIGPESYKEKQRTIQAAKEVEQRRAGGYSRKYASKAKNLADDMVRNTARDLLYYAVTQDAMLIFENLSRGFGRQGKRTFMAERQYTRMEDWLTAKLAYEGLPSKTYLSKTLAQYTSKTCSNCGFTITSADYDRVLEKLKKTATGWMTTINGKELKVEGQITYYNRYKRQNVVKDLSVELDRLSEESVNNDISSWTKGRSGEALSLLKKRFSHRPVQEKFVCLNCGFETHADEQAALNIARSWLFLRSQEYKKYQTNKTTGNTDKRAFVETWQSFYRKKLKEVWKPAV

SEQ ID NO: 969 - protein, 978 aa, synthetic construct
  REGION 1..978: note = CasX protein variant
MQEIKRINKIRRRLVKDSNTKKAGKTGPMKTLLVRVMTPDLRERLENLRKKPENIPQPISNTSRANLNKLLTDYTEMKKAILHVYWEEFQKDPVGLMSRVAQPAPKNIDQRKLIPVKDGNERLTSSGFACSQCCQPLYVYKLEQVNDKGKPHTNYFGRCNVSEHERLILLSPHKPEANDELVTYSLGKFGQRALDFYSIHVTRESNHPVKPLEQIGGNSCASGPVRKALSDACMGAVASFLTKYQDIILEHQKVIKKNEKRLANLKDIASANGLAFPKITLPPQPHTKEGIEAYNNVVAQIVIWVNLNLWQKLKIGRDEAKPLQRLKGFPSFPLVERQANEVDWWDMVCNVKKLINEKKEDGKVFWQNLAGYKRQEALLPYLSSEEDRKKGKKFARYQFGDLLLHLEKKHGEDWGKVYDEAWERIDKKVEGLSKHIKLEEERRSEDAQSKAALTDWLRAKASFVIEGLKEADKDEFCRCELKLQKWYGDLRGKPFAIEAENSILDISGFSKQYNCAFIWQKDGVKKLNLYLIINYFKGGKLRFKKIKPEAFEANRFYTVINKKSGEIVPMEVNFNFDDPNLIILPLAFGKRQGREFIWNDLLSLETGSLKLANGRVIEKTLYNRRTRQDEPALFVALTFERREVLDSSNIKPMNLIGIDRGENIPAVIALTDPEGCPLSRFKDSLGNPTHILRIGESYKEKQRTIQAAKEVEQRRAGGYSRKYASKAKNLADDMVRNTARDLLYYAVTQDAMLIFENLSRGFGRQGKRTFMAERQYTRMEDWLTAKLAYEGLPSKTYLSKTLAQYTSKTCSNCGFTITSADYDRVLEKLKKTATGWMTTINGKELKVEGQITYYNRYKRQNVVKDLSVELDRLSEESVNNDISSWTKGRSGEALSLLKKRFSHRPVQEKFVCLNCGFETHADEQAALNIARSWLFLRSQEYKKYQTNKTTGNTDKRAFVETWQSFYRKKLKEVWKPAV

SEQ ID NO: 970 - protein, 978 aa, synthetic construct
  REGION 1..978: note = CasX protein variant
MQEIKRINKIRRRLVKDSNTKKAGKTGPMKTLLVRVMTPDLRERLENLRKKPENIPQPISNTSRANLNKLLTDYTEMKKAILHVYWEEFQKDPVGLMSRVAQPAPKNIDQRKLIPVKDGNERLTSSGFACSQCCQPLYVYKLEQVNDKGKPHTNYFGRCNVSEHERLILLSPHKPEANDELVTYSLGKFGQRALDFYSIHVTRESNHPVKPLEQIGGNSCASGPVGKALSDACMGAVASFLTKYQDIILEHQKVIKKNEKRLANLKDIASANGLAFPKITLPPQPHTKEGIEAYNNVVAQIVIWVNLNLWQKLKIGRDEAKPLQRLKGFPSFPLVERQANEVDWWDMVCNVKKLINEKKEDGKVFWQNLAGYKRQEALLPYLSSEEDRKKGKKFARYQFGDLLLHLEKKHGEDWGKVYDEAWERIDKKVEGLSKHIKLEEERRSEDAQSKAALTDWLRAKASFVIEGLKEADKDEFCRCELKLQKWYGDLRGKPFAIEAENSILDISGFSKQYNCAFIWQKDGVKKLNLYLIINYFKGGKLRFKKIKPEAFEANRFYTVINKKSGEIVPMEVNFNFDDPNLIILPLAFGKRQGREFIWNDLLSLETGSLKLANGRVIEKTLYNRRTRQDEPALFVALTFERREVLDSSNIKPMNLIGIDRGENIPAVIALTDPEGCPLSRFKDSLGNPTHILRIGESYKEKQRTIQAAKEVEQRRAGGYSRKYASKAKNLADDMVRNTARDLLYYAVTQDAMLIFENLSRGFGRQGKRTFMAERQYTRMEDWLTAKLAYEGLPSKTYLSKTLAQYTSKTCSNCGFTITSADYDRVLEKLKKTATGWMTTINGKELKVEGQITYYNRYKRQNVVKDLSVELDRLSEESVNNDISSWTKGRSGEALSLLKKRFSHRPVQEKFVCLNCGFETHADEQAALNIARSWLFLRSQEYKKYQTNKTTGNTDKRAFVETWQSFYRKKLKEVGKPAV

SEQ ID NO: 971 - protein, 979 aa, synthetic construct
  REGION 1..979: note = CasX protein variant
MQEIKRINKIRRRLVKDSNTKKAGKTGPMKTLLVRVMTPDLRERLENLRKKPENIPQPISNTSRANLNKLLTDYTEMKKAILHVYWEEFQKDPVGLMSRVAQPAPKNIDQRKLIPVKDGNERLTSSGFACSQCCQPLYVYKLEQVNDKGKPHTNYFGRCNVSEHERLILLSPHKPEANDELVTYSLGKFGQRALDFYSIHVTRESNHPVKPLEQIGGNSCASGPVGKALSDACMGAVASFLTKYQDIILEHQKVIKKNEKRLANLKDIASANGLAFPKITLPPQPHTKEGIEAYNNVVAQIVIWVNLNLWQKLKIGRDEAKPLQRLKGFPSFPLVERQANEVDWWDMVCNVKKLINEKKEDGKVFWQNLAGYKRQEALLPYLSSEEDRKKGKKFARYQFGDLLLHLEKKHGEDWGKVYDEAWERIDKKVEGLSKHIKLEEERRSEDAQSKAALTDWLRAKASFVIEGLKEADKDEFCRCELKLQKWYGDLRGKPFAIEAENSILDISGFSKQYNCAFIWQKDGVKKLNLYLIINYFKGGKLRFKKIKPEAFEANRFYTVINKKSGEIVPMEVNFNFDDPNLIILPLAFGKRQGREFIWNDLLSLETGSLKLANGRVIEKTLYNRRTRQDEPALFVALTFERREVLDSSNIKPMNLIGIDRGENIPAVIALTDPEGCPLSRFKDSLGNPTHILRIGESYKEKQRTIQAAKEVEQRRAGGYSRKYASKAKNLADDMVRNTARDLLYYAVTQDAMLIFENLSRGFGRQGKRTFMAMERQYTRMEDWLTAKLAYEGLPSKTYLSKTLAQYTSKTCSNCGFTITSADYDRVLEKLKKTATGWMTTINGKELKVEGQITYYNRYKRQNVVKDLSVELDRLSEESVNNDISSWTKGRSGEALSLLKKRFSHRPVQEKFVCLNCGFETHADEQAALNIARSWLFLRSQEYKKYQTNKTTGNTDKRAFVETWQSFYRKKLKEVWKPAV

SEQ ID NO: 972 - protein, 978 aa, synthetic construct
  REGION 1..978: note = CasX protein variant
MQEIKRINKIRRRLVKDSNTKKAGKTGPMKTLLVRVMTPDLRERLENLRKKPENIPQPISNTSRANLNKLLTDYTEMKKAILHVYWEEFQKDPVGLMSRVAQPAPKNIDQRKLIPVKDGNERLTSSGFACSQCCQPLYVYKLEQVNDKGKPHTNYFGRCNVSEHERLILLSPHKPEANDELVTYSLGKFGQRALDFYSIHVTRESNHPVKPLEQIGGNSCASGPVGKALSDACMGAVASFLTKYQDIILEHQKVIKKNEKRLANLKDIASANGLAFPKITLPPQPHTKEGIEAYNNVVAQIVIWVNLNLWQKLKIGRDEAKPLQRLKGFPSFPLVERQANEVDWWDMVCNVKKLINEKKEDGKVFWQNLAGYKRQEALLPYLSSEEDRKKGKKFARYQFGDLLLHLEKKHGEDWGKVYDEAWERIDKKVEGLSKRIKLEEERRSEDAQSKAALTDWLRAKASFVIEGLKEADKDEFCRCELKLQKWYGDLRGKPFAIEAENSILDISGFSKQYNCAFIWQKDGVKKLNLYLIINYFKGGKLRFKKIKPEAFEANRFYTVINKKSGEIVPMEVNFNFDDPNLIILPLAFGKRQGREFIWNDLLSLETGSLKLANGRVIEKTLYNRRTRQDEPALFVALTFERREVLDSSNIKPMNLIGIDRGENIPAVIALTDPEGCPLSRFKDSLGNPTHILRIGESYKEKQRTIQAAKEVEQRRAGGYSRKYASKAKNLADDMVRNTARDLLYYAVTQDAMLIFENLSRGFGRQGKRTFMAERQYTRMEDWLTAKLAYEGLPSKTYLSKTLAQYTSKTCSNCGFTITSADYDRVLEKLKKTATGWMTTINGKELKVEGQITYYNRYKRQNVVKDLSVELDRLSEESVNNDISSWTKGRSGEALSLLKKRFSHRPVQEKFVCLNCGFETHADEQAALNIARSWLFLRSQEYKKYQTNKTTGNTDKRAFVETWQSFYRKKLKEVWKPAV

SEQ ID NO: 973 - protein, 978 aa, synthetic construct
  REGION 1..978: note = CasX protein variant
MQEIKRINKIRRRLVKDSNTKKAGKTGPMKTLLVRVMTPDLRERLENLRKKPENIPQPISNTSRANLNKLLTDYTEMKKAILHVYWEEFQKDPVGLMSRVAQPAPKNIDQRKLIPVKDGNERLTSSGFACSQCCQPLYVYKLEQVNDKGKPHTNYFGRCNVSEHERLILLSPHKPEANDELVTYSLGKFGQRALDFYSIHVTRESNHPVKPLEQIGGNSCASGPVGKALSDACMGAVASFLTKYQDIILEHQKVIKKNEKRLANLKDIASANGLAFPKITLPPQPHTKEGIEAYNNVVAQIVIWVNLNLWQKLKIGRDEAKPLQRLKGFPSFPLVERQANEVDWWDMVCNVKKLINEKKEDGKVFWQNLAGYKRQEALLPYLSSEEDRKKGKKFARYQFGDLLLHLEKKHGEDWGKVYDEAWERIDKKVEGLSKHIKLEEERRSEDAQSKAALTDWLRAKASFVIEGLKEADKDEFCRCELKLQKWYGDLRGKPFAIEAENSILDISGFSKQYNCAFIWQKDGVKKLNLYLIINYFKGGKLRFKKIKPEAFEANRFYTVINKKSGEIVPMEVNFNFDDPNLIILPLAFGKRQGREFIWNDLLSLETGSLKLANGRVIEKTLYNRRTRQDEPALFVALTFERREVLDSSNIKPMNLIGIDRGENIPAVIALTDPEGCPLSRFKDSLGNPTHILRIGESYKEKQRTIQAAKEVEQRRAGGYSRKYSSKAKNLADDMVRNTARDLLYYAVTQDAMLIFENLSRGFGRQGKRTFMAERQYTRMEDWLTAKLAYEGLPSKTYLSKTLAQYTSKTCSNCGFTITSADYDRVLEKLKKTATGWMTTINGKELKVEGQITYYNRYKRQNVVKDLSVELDRLSEESVNNDISSWTKGRSGEALSLLKKRFSHRPVQEKFVCLNCGFETHADEQAALNIARSWLFLRSQEYKKYQTNKTTGNTDKRAFVETWQSFYRKKLKEVWKPAV

SEQ ID NO: 974 - protein, 978 aa, synthetic construct
  REGION 1..978: note = CasX protein variant
MQEIKRINKIRRRLVKDSNTKKAGKTGPMKTLLVRVMTPDLRERLENLRKKPENIPQPISNTSRANLNKLLTDYTEMKKAILHVYWEEFQKDPVGLMSRVAQPAPKNIDQRKLIPVKDGNERLTSSGFACSQCCQPLYVYKLEQVNDKGKPHTNYFGRCNVSEHERLILLSPHKPEANDELVTYSLGKFGQRALDFYSIHVTRESNHPVKPLEQIGGNSCASGPVGKALSDACMGAVASFLTKYQDIILEHQKVIKKNEKRLANLKDIASANGLAFPKITLPPQPHTKEGIEAYNNVVAQIVIWVNLNLWQKLKIGRDEAKPLQRLKGFPSFPLVERQANEVDWWDMVCNVKKLINEKKEDGKVFWQNLAGYKRQEALLPYLSSEEDRKKGKKFARYQFGDLLLHLEKKHGEDWGKVYDEAWERIDKKVEGLSKHIKLEEERRSEDAQSKAALTDWLRAKASFVIEGLKEADKDEFCRCELKLQKWYGDLRGKPFAIEAENSILDISGFSKQYNCAFIWQKDGVKKLNLYLIINYFKGGKLRFKKIKPEAFEANRFYTVINKKSGEIVPMEVNFNFDDPNLIILPLAFGKRQGREFIWNDLLSLETGSLKLANGRVIEKTLYNRRTRQDEPALFVALTFERREVLDSSNIKPMNLIGIDRGENIPAVIALTDPEGCPLSRFKDSLGNPTHILRIGESYKEKQRKIQAAKEVEQRRAGGYSRKYASKAKNLADDMVRNTARDLLYYAVTQDAMLIFENLSRGFGRQGKRTFMAERQYTRMEDWLTAKLAYEGLPSKTYLSKTLAQYTSKTCSNCGFTITSADYDRVLEKLKKTATGWMTTINGKELKVEGQITYYNRYKRQNVVKDLSVELDRLSEESVNNDISSWTKGRSGEALSLLKKRFSHRPVQEKFVCLNCGFETHADEQAALNIARSWLFLRSQEYKKYQTNKTTGNTDKRAFVETWQSFYRKKLKEVWKPAV

SEQ ID NO: 975 - protein, 978 aa, synthetic construct
  REGION 1..978: note = CasX protein variant
MQEIKRINKIRRRLVKDSNTKKAGKTGPMKTLLVRVMTPDLRERLENLRKKPENIPQPISNTSRANLNKLLTDYTEMKKAILHVYWEEFQKDPVGLMSRVAQPAPKNIDQRKLIPVKDGNERLTSSGFACSQCCQPLYVYKLEQVNDKGKPHTNYFGRCNVSEHERLILLSPHKPEANDELVTYSLGKFGQRALDFYSIHVTRESNHPVKPLEQIGGNSCASGPVGKALSDACMGAVASFLTKYQDIILEHQKVIKKNEKRLANLKDIASANGLAFPKITLPPQPHTKEGIEAYNNVVAQIVIWVNLNLWQKLKIGRDEAKPLQRLKGFPSFPLVERQANEVDWWDMVCNVKKLINEKKEDGKVFWQNLAGYKRQEALLPYLSSEEDRKKGKKFARYQFGDLLLHLEKKHGEDWGKVYDEAWERIDKKVEGLSKHIKLEEERRSEDAQSKAALTDWLRAKASFVIEGLKEADKDEFCRCELKLQKWYGDLRGKPFAIEAENSILDISGFSKQYNCAFIWQKDGVKKLNLYLIINYFKGGKLRFKKIKPEAFEANRFYTVINKKSGEIVPMEVNFNFDDPNLIILPLAFGKRQGREFIWNDLLSLETGSLKLANGRVIEKTLYNRRTRQDEPALFVALTFERREVLDSSNIKPMNLIGIDRGENIPAVIALTDPEGCPLSRFKDSLGNPTHILRIGESYKEKQRTIQAAKEVEQRRAGGYSRKYASKAKNLADDMVRNTARDLLYYAVTQDAMLIFENLSRGFGRQGKRTFMAERQYTRMEDWLTAKLAYEGLPSKTYLSKTLAQYTSKTCSNCGFTITSADYDRVLEKLKKTATGWMTTINGKELKVEGQITYYNRYKRQNVVKDLSVELDRLSEESVNNDISSWTKGRSGEALSLLKKRFSHRPVQEKFVCLNCGFETHADEQAALNIARSWLFLRSQEYKKYQTNKTTGNTDKRAFVETWQSFNRKKLKEVWKPAV

SEQ ID NO: 976 - protein, 978 aa, synthetic construct
  REGION 1..978: note = CasX protein variant
MQEIKRINKIRRRLVKDSNTKKAGKTGPMKTLLVRVMTPDLRERLENLRKKPENIPQPISNTSRANLNKLLTDYTEMKKAILHVYWEEFQKDPVGLMSRVAQPAPKNIDQRKLIPVKDGNERLTSSGFACSQCCQPLYVYKLEQVNDKGKPHTNYFGRCNVSERERLILLSPHKPEANDELVTYSLGKFGQRALDFYSIHVTRESNHPVKPLEQIGGNSCASGPVGKALSDACMGAVASFLTKYQDIILEHQKVIKKNEKRLANLKDIASANGLAFPKITLPPQPHTKEGIEAYNNVVAQIVIWVNLNLWQKLKIGRDEAKPLQRLKGFPSFPLVERQANEVDWWDMVCNVKKLINEKKEDGKVFWQNLAGYKRQEALLPYLSSEEDRKKGKKFARYQFGDLLLHLEKKHGEDWGKVYDEAWERIDKKVEGLSKHIKLEEERRSEDAQSKAALTDWLRAKASFVIEGLKEADKDEFCRCELKLQKWYGDLRGKPFAIEAENSILDISGFSKQYNCAFIWQKDGVKKLNLYLIINYFKGGKLRFKKIKPEAFEANRFYTVINKKSGEIVPMEVNFNFDDPNLIILPLAFGKRQGREFIWNDLLSLETGSLKLANGRVIEKTLYNRRTRQDEPALFVALTFERREVLDSSNIKPMNLIGIDRGENIPAVIALTDPEGCPLSRFKDSLGNPTHILRIGESYKEKQRTIQAAKEVEQRRAGGYSRKYASKAKNLADDMVRNTARDLLYYAVTQDAMLIFENLSRGFGRQGKRTFMAERQYTRMEDWLTAKLAYEGLPSKTYLSKTLAQYTSKTCSNCGFTITSADYDRVLEKLKKTATGWMTTINGKELKVEGQITYYNRYKRQNVVKDLSVELDRLSEESVNNDISSWTKGRSGEALSLLKKRFSHRPVQEKFVCLNCGFETHADEQAALNIARSWLFLRSQEYKKYQTNKTTGNTDKRAFVETWQSFYRKKLKEVWKPAV

SEQ ID NO: 977 - protein, 978 aa, synthetic construct
  REGION 1..978: note = CasX protein variant
MQEIKRINKIRRRLVKDSNTKKAGKTGPMKTLLVRVMTPDLRERLENLRKKPENIPQPISNTSRANLNKLLTDYTEMKKAILHVYWEEFQKDPVGLMSRVAQPAPKNIDQRKLIPVKDGNERLTSSGFACSQCCQPLYVYKLEQVNDKGKPHTNYFGRCNVSEHERLILLSPHKPEANDELVTYSLGKFGQRALDFYSIHVTRESNHPVKPLEQIGGNSCASGPVGKALSDACMGAVASFLTKYQDIILEHQKVIKKNEKRLANLKDIASANGLAFPKITLPPQPHTKEGIEAYNNVVAQIVIWVNLNLWQKLKIGRDEAKPLQRLKGFPSFPLVERQANEVDWWDMVCNVKKLINEKKEDGKVFWQNLAGYKRQEALLPYLSSEEDRKKGKKFARYQFGDLLLHLEKKHGEDWGKVYDEAWERIDKKVEGLSKHIKLEEERRSEDAQSKAALTDWLRAKASFVIEGLKEADKDEFCRCELKLQKWYGDLRGKPFAIEAENSILDISGFSKQYNCAFIWQKDGVKKLNLYLIINYFKGGKLRFKKIKPEAFEANRIYTVINKKSGEIVPMEVNFNFDDPNLIILPLAFGKRQGREFIWNDLLSLETGSLKLANGRVIEKTLYNRRTRQDEPALFVALTFERREVLASSNIKPMNLIGIDRGENIPAVIALTDPEGCPLSRFKDSLGNPTHILRIDESYKEKQRTIQAAKEVEQRRAGGYSRKYASKAKNLADDMVRNTARDLLYYAVTQDSMLIFENLSRGFGRQGKRTFMAERQYTRMEDWLTAKLAYEGLPSKTYLSKTLAQYTSKTCSNCGFTITSPDYDRVLEKLKKTATGWMTTINGKELKVEGQITYYNRYKRQNVVKDLSVELDRLSEESVNNDISSWTKGRSGEALSLLKKRFSHRPVQEKFVCLNCGFETHADEQAALNIARSWLFLRSQEYKKYQTNKTTGNTDKRAFVETWQSFYRKKLKEVWKPAV

SEQ ID NO: 978 - protein, 978 aa, synthetic construct
  REGION 1..978: note = CasX protein variant
MQEIKRINKIRRRLVKDSNTKKAGKTGPMKTLLVRVMTPDLRERLENLRKKPENIPQPISNTSRANLNKLLTDYTEMKKAILHVYWEEFQKDPVGLMSRVAQPAPKNIDQRKLIPVKDGNERLTSSGFACSQCCQPLYVYKLEQVNDKGKPHTNYFGRCNVSEHERLILLSPHKPEANDELVTYSLGKFGQRALDFYSIHVTRESNHPVKPLEQIGGNSCASGPVGKALSDACMGAVASFLTKYQDIILEHQKVIKKNEKRLANLKDIASANGLAFPKITLPPQPHTKEGIEAYNNVVAQIVIWVNLNLWQKLKIGRDEAKPLQRLKGFPSFPLVERQANEVDWWDMVCNVKKLINEKKEDGKVFWQNLAGYKRQEALLPYLSSEEDRKKGKKFARYQFGDLLLHLEKKHGEDWGKVYDEAWERIDKKVEGLSKHIKLEEERRSEDAQSKAALTDWLRAKASFVIEGLKEADKDEFCRCELKLQKWYGDLRGKPFAIEAENSILDISGFSKQYNCAFIWQKDGVKKLNLYLIINYFKGGKLRFKKIKPEAFEANRFYTVINKKSGEIVPMEVNFNFDDPNLIILPLAFGKRQGREFIWNDLLSLETGSLKLANGRVIEKTLYNRRTRQDEPALFVALTFERREVLDSSNIKPMNLIGIHRGENIPAVIALTDPEGCPLSRFKDSLGNPTHILRIGESYKEKQRTIQAAKEVEQRRAGGYSRKYASKAKNLADDMVRNTARDLLYYAVTQDAMLIFENLSRGFGRQGKRTFMAERQYTRMEDWLTAKLAYEGLPSKTYLSKTLAQYTSKTCSNCGFTITSADYDRVLEKLKKTATGWMTTINGKELKVEGQITYYNRYKRQNVVKDLSVELDRLSEESVNNDISSWTKGRSGEALSLLKKRFSHRPVQEKFVCLNCGFETHADEQAALNIARSWLFLRSQEYKKYQTNKTTGNTDKRAFVETWQSFYRKKLKEVWKPAV

SEQ ID NO: 979 - protein, 978 aa, synthetic construct
  REGION 1..978: note = CasX protein variant
MQEIKRINKIRRRLVKDSNTKKAGKTGPMKTLLVRVMTPDLRERLENLRKKPENIPQPISNTSRANLNKLLTDYTEMKKAILHVYWEEFQKDPVGLMSRVAQPAPKNIDQRKLIPVKDGNERLTSSGFACSQCCQPLYVYKLEQVNDKGKPHTNYFGRCNVSEHERLILLSPHKPEANDELVTYSLGKFGQRALDFYSIHVTRESNHPVKPLEQIGGNSCASGPVGKALSDACMGAVASFLTKYQDIILEHQKVIKKNEKRLANLKDIASANGLAFPKITLPPQPHTKEGIEAYNNVVAQIVIWVNLNLWQKLKIGRDEAKPLQRLKGFPSFPLVERQANEVDWWDMVCNVKKLINEKKEDGKVFWQNLAGYKRQEALLPYLSSEEDRKKGKKFARYQFGDLLLHLEKKHGEDWGKVYDEAWERIDKKVEGLSKHIKLEEERRSEDAQSKAALTDWLRAKASFVIEGLKEADKDEFCRCELKLQKWYGDLRGKPFAIEAENSILDISGFSKQYNCAFIWQKDGVKKLNLYLIINYFKGGKLRFKKIKPEAFEANRFYTVINKKSGEIVPMEVNFNFDDPNLIILPLAFGKRQGREFIWNDLLSLETGSLKLANGRVIEKTLYNRRTRQDEPALFVALTFERREVLDSSNIKPMNLIGIDRGENIPAVIALTDPEGCPLSRFKDSLGNPTHILRIGESYKEKQRTIQAAKEVEQRRAGGYSRKYASKAKNLADDMVRNTARDLLYYAVTQDAMLIFENLSRGFGRQGKRTFMAERQYTRMEDWLTAKLAYEGLPSKTYLSKTLAQYVSKTCSNCGFTITSADYDRVLEKLKKTATGWMTTINGKELKVEGQITYYNRYKRQNVVKDLSVELDRLSEESVNNDISSWTKGRSGEALSLLKKRFSHRPVQEKFVCLNCGFETHADEQAALNIARSWLFLRSQEYKKYQTNKTTGNTDKRAFVETWQSFYRKKLKEVWKPAV

SEQ ID NO: 980 - protein, 978 aa, synthetic construct
  REGION 1..978: note = CasX protein variant
MQEIKRINKIRRRLVKDSNTKKAGKTGPMKTLLVRVMTPDLRERLENLRKKPENIPQPISNTSRANLNKLLTDYTEMKKAILHVYWEEFQKDPVGLMSRVAQPAPKNIDQRKLIPVKDGNERLTSSGFACSQCCQPLYVYKLEQVNDKGKPHTNYFGRCNVSEHERLILLSPHKPEANDELVTYSLGKFGQRALDFYSIHVTRESNHPVKPLEQIGGNSCASGPVGKALSDACMGAVASFLTKYQDIILEHQKVIKKNEKRLANLKDIASANGLAFPKITLPPQPHTKEGIEAYNNVVAQIVIWVNLNLWQKLKIGRDEAKPLQRLKGFPSFPLVERQANEVDWWDMVCNVKKLINEKKEDGKVFWQNLAGYKRQEALLPYLSSEEDRKKGKKFARYQFGDLLLHLEKKHGEDWGKVYDEAWERIDKKVEGLSKHIKLEEERRSEDAQSKAALTDWLRAKASFVIEGLKEADKDEFCRCELKLQKWYGDLRGKPFAIEAENSILDISGFSKQYNCAFIWQKDGVKKLNLYLIINYFKGGKLRFKKIKPEAFEANRFYTVINKKSGEIVPMEVNFNFDDPNLIILPLAFGKRQGREFIWNDLLSLETGSLKLANGRVIEKTLYNRRTRQDEPALFVALTFERREVLDSSNIKPMNLIGIDRGENIPAVIALTDPEGCPLSRFKDSLGNPTHILRIGESYKEKQRTIQAAKEVEQRRAGGYSRKYASKAKNLADDMVRNTARDLLYYAVTQDAMLIFENLSRGFGRQGKRTFMAERQYTRMEDWLTAKLADEGLPSKTYLSKTLAQYTSKTCSNCGFTITSADYDRVLEKLKKTATGWMTTINGKELKVEGQITYYNRYKRQNVVKDLSVELDRLSEESVNNDISSWTKGRSGEALSLLKKRFSHRPVQEKFVCLNCGFETHADEQAALNIARSWLFLRSQEYKKYQTNKTTGNTDKRAFVETWQSFYRKKLKEVWKPAV

SEQ ID NO: 981 - protein, 978 aa, synthetic construct; identical to SEQ ID NO: 915
  REGION 1..978: note = CasX protein variant

SEQ ID NO: 982 - protein, 978 aa, synthetic construct
  REGION 1..978: note = CasX protein variant
MQEIKRINKIRRRLVKDSNTKKAGKTGPMKTLLVRVMTPDLRERLENLRKKPENIPQPISNTSRANLNKLLTDYTEMKKAILHVYWEEFQKDPVGLMSRVAQPAPKNIDQRKLIPVKDGNERLTSSGFACSQCCQPLYVYKLEQVNDKGKPHTNYFGRCNVSEHERLILLSPHKPEANDELVTYSLGKFGQRALDFYSIHVTRESNHPVKPPEQIGGNSCASGPVGKALSDACMGAVASFLTKYQDIILEHQKVIKKNEKRLANLKDIASANGLAFPKITLPPQPHTKEGIEAYNNVVAQIVIWVNLNLWQKLKIGRDEAKPLQRLKGFPSFPLVERQANEVDWWDMVCNVKKLINEKKEDGKVFWQNLAGYKRQEALLPYLSSEEDRKKGKKFARYQFGDLLLHLEKKHGEDWGKVYDEAWERIDKKVEGLSKHIKLEEERRSEDAQSKAALTDWLRAKASFVIEGLKEADKDEFCRCELKLQKWYGDLRGKPFAIEAENSILDISGFSKQYNCAFIWQKDGVKKLNLYLIINYFKGGKLRFKKIKPEAFEANRFYTVINKKSGEIVPMEVNFNFDDPNLIILPLAFGKRQGREFIWNDLLSLETGSLKLANGRVIEKTLYNRRTRQDEPALFVALTFERREVLDSSNIKPMNLIGIDRGENIPAVIALTDPEGCPLSRFKDSLGNPTHILRIGESYKEKQRTIQAAKEVEQRRAGGYSRKYASKAKNLADDMVRNTARDLLYYAVTQDAMLIFENLSRGFGRQGKRTFMAERQYTRMEDWLTAKLAYEGLPSKTYLSKTLAQYTSKTCSNCGFTITSADYDRVLEKLKKTATGWMTTINGKELKVEGQITYYNRYKRQNVVKDLSVELDRLSEESVNNDISSWTKGRSGEALSLLKKRFSHRPVQEKFVCLNCGFETHADEQAALNIARSWLFLRSQEYKKYQTNKTTGNTDKRAFVETWQSFYRKKLKEVWKPAV

SEQ ID NO: 983 - protein, 81 aa, synthetic construct
  REGION 1..81: note = nuclear localization signal
PAAKRVKLDGGKRTADGSEFESPKKKRKVAEAAAKEAAAKEAAAKAPGSRDISRQEIKRINKIRRRLVKDSNTKKAGKTGP

SEQ ID NO: 984 - protein, 64 aa, synthetic construct
  REGION 1..64: note = nuclear localization signal
PAAKRVKLDGGKRTADGSEFESPKKKRKVPGSRDISRQEIKRINKIRRRLVKDSNTKKAGKTGP

SEQ ID NO: 985 - protein, 55 aa, synthetic construct
  REGION 1..55: note = nuclear localization signal
PAAKRVKLDGGSPKKKRKVGGSSRDISRQEIKRINKIRRRLVKDSNTKKAGKTGP

SEQ ID NO: 986 - protein, 54 aa, synthetic construct
  REGION 1..54: note = nuclear localization signal
PAAKRVKLDPPPPKKKRKVPGSRDISRQEIKRINKIRRRLVKDSNTKKAGKTGP

SEQ ID NO: 987 - protein, 45 aa, synthetic construct
  REGION 1..45: note = nuclear localization signal
PAAKRVKLDPGRSRDISRQEIKRINKIRRRLVKDSNTKKAGKTGP

SEQ ID NO: 988 - protein, 40 aa, synthetic construct
  REGION 1..40: note = nuclear localization signal
PKKKRKVSRDISRQEIKRINKIRRRLVKDSNTKKAGKTGP

SEQ ID NO: 989 - protein, 36 aa, synthetic construct
  REGION 1..36: note = nuclear localization signal
PKKKRKVSRQEIKRINKIRRRLVKDSNTKKAGKTGP

SEQ ID NO: 990 - protein, 38 aa, synthetic construct
  REGION 1..38: note = nuclear localization signal
PAAKRVKLDSRQEIKRINKIRRRLVKDSNTKKAGKTGP

SEQ ID NO: 991 - protein, 21 aa, synthetic construct
  REGION 1..21: note = nuclear localization signal
TSPKKKRKVALEYPYDVPDYA

SEQ ID NO: 992 - protein, 33 aa, synthetic construct
  REGION 1..33: note = nuclear localization signal
TLESKRPAATKKAGQAKKKKAPGEYPYDVPDYA

SEQ ID NO: 993 - protein, 27 aa, synthetic construct
  REGION 1..27: note = nuclear localization signal
GSKRPAATKKAGQAKKKKYPYDVPDYA

SEQ ID NO: 994 - protein, 52 aa, synthetic construct
  REGION 1..52: note = nuclear localization signal
TLESKRPAATKKAGQAKKKKGGSKRPAATKKAGQAKKKKAPGEYPYDVPDYA

SEQ ID NO: 995 - protein, 77 aa, synthetic construct
  REGION 1..77: note = nuclear localization signal
TLESKRPAATKKAGQAKKKKGGSKRPAATKKAGQAKKKKGGSKRPAATKKAGQAKKKKGGSKRPAATKKAGQAKKKK

SEQ ID NO: 996 - protein, 115 aa, synthetic construct
  REGION 1..115: note = nuclear localization signal
TLESKRPAATKKAGQAKKKKGGSKRPAATKKAGQAKKKKGGSKRPAATKKAGQAKKKKGGSKRPAATKKAGQAKKKKGGSKRPAATKKAGQAKKKKGGSKRPAATKKAGQAKKKK

SEQ ID NO: 997 - protein, 41 aa, synthetic construct
  REGION 1..41: note = nuclear localization signal
TLESPKKKRKVGGSPKKKRKVGGSPKKKRKVGGSPKKKRKV

SEQ ID NO: 998 - protein, 49 aa, synthetic construct
  REGION 1..49: note = nuclear localization signal
TLESPAAKRVKLDGGSPAAKRVKLDGGSPAAKRVKLDGGSPAAKRVKLD

SEQ ID NO: 999 - protein, 73 aa, synthetic construct
  REGION 1..73: note = nuclear localization signal
TLESPAAKRVKLDGGSPAAKRVKLDGGSPAAKRVKLDGGSPAAKRVKLDGGSPAAKRVKLDGGSPAAKRVKLD

SEQ ID NO: 1000 - protein, 20 aa, synthetic construct
  REGION 1..20: note = nuclear localization signal
TLESKRPAATKKAGQAKKKK

SEQ ID NO: 1001 - protein, 39 aa, synthetic construct
  REGION 1..39: note = nuclear localization signal
TLESKRPAATKKAGQAKKKKGGSKRPAATKKAGQAKKKK

SEQ ID NO: 1002 - protein, 13 aa, synthetic construct
  REGION 1..13: note = nuclear localization signal
TLEGGSPKKKRKV

SEQ ID NO: 1003 - protein, 34 aa, synthetic construct
  REGION 1..34: note = nuclear localization signal
TLEVGPKRTADSQHSTPPKTKRKVEFEPKKKRKV

SEQ ID NO: 1004 - protein, 40 aa, synthetic construct
  REGION 1..40: note = nuclear localization signal
TLEVGGGSGGGSKRTADSQHSTPPKTKRKVEFEPKKKRKV

SEQ ID NO: 1005 - protein, 49 aa, synthetic construct
  REGION 1..49: note = nuclear localization signal
TLEVAEAAAKEAAAKEAAAKAKRTADSQHSTPPKTKRKVEFEPKKKRKV

SEQ ID NO: 1006 - protein, 44 aa, synthetic construct
  REGION 1..44: note = nuclear localization signal
TLEVGPPKKKRKVGGSKRTADSQHSTPPKTKRKVEFEPKKKRKV

SEQ ID NO: 1007 - protein, 32 aa, synthetic construct
  REGION 1..32: note = nuclear localization signal
TLEVGPAEAAAKEAAAKEAAAKAPAAKRVKLD

SEQ ID NO: 1008 - protein, 27 aa, synthetic construct
  REGION 1..27: note = nuclear localization signal
TLEVGPGGGSGGGSGGGSPAAKRVKLD

SEQ ID NO: 1009 - protein, 25 aa, synthetic construct
  REGION 1..25: note = nuclear localization signal
TLEVGPPKKKRKVPPPPAAKRVKLD

SEQ ID NO: 1010 - protein, 15 aa, synthetic construct
  REGION 1..15: note = nuclear localization signal
TLEVGPPAAKRVKLD

SEQ ID NO: 1011 - protein, 18 aa, synthetic construct
  REGION 1..18: note = nuclear localization signal
GSKRPAATKKAGQAKKKK

SEQ ID NO: 1012 - protein, 9 aa, synthetic construct
  REGION 1..9: note = nuclear localization signal
GSPKKKRKV

SEQ ID NO: 1013 - protein, 36 aa, synthetic construct
  REGION 1..36: note = nuclear localization signal
GGGSGGGSKRTADSQHSTPPKTKRKVEFEPKKKRKV

SEQ ID NO: 1014 - protein, 40 aa, synthetic construct
  REGION 1..40: note = nuclear localization signal
GPPKKKRKVGGSKRTADSQHSTPPKTKRKVEFEPKKKRKV

SEQ ID NO: 1015 - protein, 26 aa, synthetic construct
  REGION 1..26: note = nuclear localization signal
TGGGPGGGAAAGSGSPKKKRKVGSGS

SEQ ID NO: 1016 - protein, 30 aa, synthetic construct
  REGION 1..30: note = nuclear localization signal
GPKRTADSQHSTPPKTKRKVEFEPKKKRKV

SEQ ID NO: 1017 - protein, 45 aa, synthetic construct
  REGION 1..45: note = nuclear localization signal
AEAAAKEAAAKEAAAKAKRTADSQHSTPPKTKRKVEFEPKKKRKV

SEQ ID NO: 1018 - protein, 21 aa, synthetic construct
  REGION 1..21: note = nuclear localization signal
GPPKKKRKVPPPPAAKRVKLD

SEQ ID NO: 1019 - protein, 71 aa, synthetic construct
  REGION 1..71: note = nuclear localization signal
GSPAAKRVKLDGGSPAAKRVKLDGGSPAAKRVKLDGGSPAAKRVKLDGGSPAAKRVKLDGGSPAAKRVKLD

SEQ ID NO: 1020 - protein, 41 aa, synthetic construct
  REGION 1..41: note = nuclear localization signal
GSPAAKRVKLGGSPAAKRVKLGGSPKKKRKVGGSPKKKRKV

SEQ ID NO: 1021 - protein, 37 aa, synthetic construct
  REGION 1..37: note = nuclear localization signal
GSKRPAATKKAGQAKKKKGGSKRPAATKKAGQAKKKK

SEQ ID NO: 1022 - RNA, 46 nt, synthetic construct
  misc_feature 1..46: note = triplex loop
  misc_difference 37..39: note = n is any ribonucleotide
  source 1..46: mol_type = other RNA
actggcgcttttatctgattactttgagagccatcannnatcaaag

SEQ ID NO: 1023 - protein, 5 aa, synthetic construct
  REGION 1..5: note = linker
  VARIANT 2..5: note = individual amino acid residues may be present or absent
GGGGG

SEQ ID NO: 1024 - protein, 10 aa, synthetic construct
  REGION 1..10: note = linker
  VARIANT 3..4: note = grouped amino acid residues may be present or absent
  VARIANT 5..6: note = grouped amino acid residues may be present or absent
  VARIANT 7..8: note = grouped amino acid residues may be present or absent
  VARIANT 9..10: note = grouped amino acid residues may be present or absent
GSGSGSGSGS

SEQ ID NO: 1025 - protein, 17 aa, synthetic construct
  REGION 1..17: note = linker
AEAAAKEAAAKEAAAKA

SEQ ID NO: 1026 - protein, 50 aa, synthetic construct
  REGION 1..50: note = peptide transduction domain
  VARIANT 4..50: note = individual amino acid residues may be present or absent
RRRRRRRRRRRRRRRRRRRRRRRRRRRRRRRRRRRRRRRRRRRRRRRRRR

SEQ ID NO: 1027 - DNA, 2931 bp, synthetic construct; identical to SEQ ID NO: 76
  misc_feature 1..2931: note = CasX 488 variant
  source 1..2931: mol_type = other DNA

SEQ ID NO: 1028 - DNA, 2931 bp, synthetic construct; identical to SEQ ID NO: 77
  misc_feature 1..2931: note = CasX 491 variant
  source 1..2931: mol_type = other DNA

SEQ ID NO: 1029 - DNA, 2934 bp, synthetic construct; identical to SEQ ID NO: 78
  misc_feature 1..2934: note = CasX 515 variant
  source 1..2934: mol_type = other DNA

SEQ ID NO: 1030 - DNA, 2934 bp, synthetic construct; identical to SEQ ID NO: 79
  misc_feature 1..2934: note = CasX 527 variant
  source 1..2934: mol_type = other DNA

SEQ ID NO: 1031 - DNA, 2934 bp, synthetic construct; identical to SEQ ID NO: 80
  misc_feature 1..2934: note = CasX 535
  source 1..2934: mol_type = other DNA

SEQ ID NO: 1032 - DNA, 2934 bp, synthetic construct; identical to SEQ ID NO: 81
  misc_feature 1..2934: note = CasX 536 variant
  source 1..2934: mol_type = other DNA

SEQ ID NO: 1033 - DNA, 2934 bp, synthetic construct; identical to SEQ ID NO: 82
  misc_feature 1..2934: note = CasX 537 variant
  source 1..2934: mol_type = other DNA

SEQ ID NO: 1034 - DNA, 2934 bp, synthetic construct; identical to SEQ ID NO: 83
  misc_feature 1..2934: note = CasX 583 variant
  source 1..2934: mol_type = other DNA

SEQ ID NO: 1035 - DNA, 2931 bp, synthetic construct; identical to SEQ ID NO: 84
  misc_feature 1..2931: note = CasX 660 variant
  source 1..2931: mol_type = other DNA

SEQ ID NO: 1036 - DNA, 2931 bp, synthetic construct; identical to SEQ ID NO: 85
  misc_feature 1..2931: note = CasX 661
  source 1..2931: mol_type = other DNA

SEQ ID NO: 1037 - DNA, 2931 bp, synthetic construct; identical to SEQ ID NO: 86
  misc_feature 1..2931: note = CasX 662 variant
  source 1..2931: mol_type = other DNA

SEQ ID NO: 1038 - DNA, 2931 bp, synthetic construct; identical to SEQ ID NO: 87
  misc_feature 1..2931: note = CasX 663 variant
  source 1..2931: mol_type = other DNA

SEQ ID NO: 1039 - DNA, 2931 bp, synthetic construct; identical to SEQ ID NO: 88
  misc_feature 1..2931: note = CasX 664 variant
  source 1..2931: mol_type = other DNA

SEQ ID NO: 1040 - DNA, 2937 bp, synthetic construct
  misc_feature 1..2937: note = CasX 668 variant
  source 1..2937: mol_type = other DNA
caagagatcaagagaatcaacaagatcagaaggagactggtcaaggacagcaacacaaagaaggccggcaagacacggggccccatgaaaaccctgctcgtcagagtgatgacccctgacctgagagagcggctggaaaacctgagaaagaagcccgagaacatccctcagcctatcagcaacaccagcagggccaacctgaacaagctgctgaccgactacaccgagatgaagaaagccatcctgcacgtgtactgggaagagttccagaaagaccccgtgggcctgatgagcagagttgctcagcctgccagcaagaagatcgaccagaacaagctgaagcccgagatggacgagaagggcaatctgaccacagccggctttgcctgctctcagtgtggccagcctctgttcgtgtacaagctggaacaggtgtccgagaaaggcaaggcctacaccaactacttcggcagatgtaacgtggccgagcacgagaagctgattctgctggcccagctgaaacctgagaaggactctgatgaggccgtgacctacagcctgggcaagtttggacagagagccctggacttctacagcatccacgtgaccaaagaaagcacacaccccgtgaagcccctggctcagatcgccggcaatagatacgcctcttcccctgtgggcaaagccctgtccgatgcctgcatgggaacaatcgccagcttcctgagcaagtaccaggacatcatcatcgagcaccagaaggtggtcaagggcaaccagaagagactggaaagcctgagggagctggccggcaaagagaacctggaataccccagcgtgaccctgcctcctcagcctcacacaaaagaaggcgtggacgcctacaacgaagtgatcgccagagtgagaatgtgggtcaacctgaacctgtggcagaagctgaaactgtccagggacgacgccaagcctctgctgagactgaagggcttccctagcttccctctggtggaaagacaggccaatgaagtggattggtgggacatggtctgcaacgtgaagaagctgatcaacgagaagaaagaggatggcaaggttttctggcagaacctggccggctacaagagacaagaagccctgaggccttacctgagcagcgaagaggaccggaagaagggcaagaagttcgccagataccagctgggcgacctgctgctgcacctggaaaagaagcacggcgaggactggggcaaagtgtacgatgaggcctgggagagaatcgacaagaaggtggaaggcctgagcaagcacattaagctggaagaggaaagaaggagcgaggacgcccaatctaaagccgctctgaccgattggctgagagccaaggccagctttgtgatcgagggcctgaaagaggccgacaaggacgagttctgcagatgcgagctgaagctgcagaagtggtacggcgatctgagaggcaagcccttcgccattgaggccgagaacagcatcctggacatcagcggcttcagcaagcagtacaactgcgccttcatttggcagaaagacggcgtcaagaaactgaacctgtacctgatcatcaattacttcaaaggcggcaagctgcggttcaagaagatcaaacccgaggccttcgaggctaacagattctacaccgtgatcaacaaaaagtccggcgagatcgtgcccatggaagtgaacttcaacttcgacgaccccaacctgattatcctgcctctggccttcggcaagagacagggcagagagttcatctggaacgatctgctgagcctggaaaccggctctctgaagctggccaatggcagagtgatcgagaaaaccctgtacaacaggagaaccagacaggacgagcctgctctgtttgtggccctgaccttcgagagaagagaggtgctggacagcagcaacatcaagcccatgaacctgatcggcgtggaccggggcgagaatatccctgctgtgatcgccctgacagaccctgaaggatgcccactgagcagattcaaggactccctgggcaaccctacacacatcctgagaatcggcgagagctacaaagagaagcagaggacaatccaggccaagaaagaggtggaacagagaagagccggcggatactctaggaagtacgccagcaaggccaagaatctggccgacgacatggtccgaaacaccgccagagatctgctgtactacgccgtgacacaggacgccatgctgatcttcgagaatctgagcagaggcttcggccggcagggcaagagaacctttatggccgagaggcagtacaccagaatggaagattggctcacagctaaactggcctacgagggactgcccagcaagacctacctgtccaaaacactggcccagtatacctccaagacctgcagcaattgcggcttcaccatcaccagcgccgactacgacagagtgctggaaaagctcaagaaaaccgccaccggctggatgaccaccatcaacggcaaagagctgaaggttgagggccagatcacctactacaacaggtacaagaggcagaacgtcgtgaaggatctgagcgtggaactggacagactgagcgaagagagcgtgaacaacgacatcagcagctggacaaagggcagatcaggcgaggctctgagcctgctgaagaagaggtttagccacagacctgtgcaagagaagttcgtgtgcctgaactgcggcttcgagacacacgccgatgaacaggctgccctgaacattgccagaagctggctgttcctgagaagccaagagtacaagaagtaccagaccaacaagaccaccggcaacaccgacaagagggcctttgtggaaacctggcagagcttctacagaaaaaagctgaaagaagtctggaagcccgccgtg

SEQ ID NO: 1041 - DNA, 2937 bp, synthetic construct
  misc_feature 1..2937: note = CasX 670 variant
  source 1..2937: mol_type = other DNA
caagagatcaagagaatcaacaagatcagaaggagactggtcaaggacagcaacacaaagaaggccggcaagacacggggccccatgaaaaccctgctcgtcagagtgatgacccctgacctgagagagcggctggaaaacctgagaaagaagcccgagaacatccctcagcctatcagcaacaccagcagggccaacctgaacaagctgctgaccgactacaccgagatgaagaaagccatcctgcacgtgtactgggaagagttccagaaagaccccgtgggcctgatgagcagagttgctcagcctgccagcaagaagatcgaccagaacaagctgaagcccgagatggacgagaagggcaatctgaccacagccggctttgcctgctctcagtgtggccagcctctgttcgtgtacaagctggaacaggtgtccgagaaaggcaaggcctacaccaactacttcggcagatgtaacgtggccgagcacgagaagctgattctgctggcccagctgaaacctgagaaggactctgatgaggccgtgacctacagcctgggcaagtttggacagagagccctggacttctacagcatccacgtgaccaaagaaagcacacaccccgtgaagcccctggctcagatcgccggcaatagatacgcctcttcccctgtgggcaaagccctgtccggcgcctgcatgggaacaatcgccagcttcctgagcaagtaccaggacatcatcatcgagcaccagaaggtggtcaagggcaaccagaagagactggaaagcctgagggagctggccggcaaagagaacctggaataccccagcgtgaccctgcctcctcagcctcacacaaaagaaggcgtggacgcctacaacgaagtgatcgccagagtgagaatgtgggtcaacctgaacctgtggcagaagctgaaactgtccagggacgacgccaagcctctgctgagactgaagggcttccctagcttccctctggtggaaagacaggccaatgaagtggattggtgggacatggtctgcaacgtgaagaagctgatcaacgagaagaaagaggatggcaaggttttctggcagaacctggccggctacaagagacaagaagccctgaggccttacctgagcagcgaagaggaccggaagaagggcaagaagttcgccagataccagctgggcgacctgctgctgcacctggaaaagaagcacggcgaggactggggcaaagtgtacgatgaggcctgggagagaatcgacaagaaggtggaaggcctgagcaagcacattaagctggaagaggaaagaaggagcgaggacgcccaatctaaagccgctctgaccgattggctgagagccaaggccagctttgtgatcgagggcctgaaagaggccgacaaggacgagttctgcagatgcgagctgaagctgcagaagtggtacggcgatctgagaggcaagcccttcgccattgaggccgagaacagcatcctggacatcagcggcttcagcaagcagtacaactgcgccttcatttggcagaaagacggcgtcaagaaactgaacctgtacctgatcatcaattacttcaaaggcggcaagctgcggttcaagaagatcaaacccgaggccttcgaggctaacagattctacaccgtgatcaacaaaaagtccggcgagatcgtgcccatggaagtgaacttcaacttcgacgaccccaacctgattatcctgcctctggccttcggcaagagacagggcagagagttcatctggaacgatctgctgagcctggaaaccggctctctgaagctggccaatggcagagtgatcgagaaaaccctgtacaacaggagaaccagacaggacgagcctgctctgtttgtggccctgaccttcgagagaagagaggtgctggacagcagcaacatcaagcccatgaacctgatcggcgtggaccggggcgagaatatccctgctgtgatcgccctgacagaccctgaaggatgcccactgagcagattcaaggactccctgggcaaccctacacacatcctgagaatcggcgagagctacaaagagaagcagaggacaatccaggccaagaaagaggtggaacagagaagagccggcggatactctaggaagtacgccagcaaggccaagaatctggccgacgacatggtccgaaacaccgccagagatctgctgtactacgccgtgacacaggacgccatgctgatcttcgagaatctgagcagaggcttcggccggcagggcaagagaacctttatggccgagaggcagtacaccagaatggaagattggctcacagctaaactggcctacgagggactgcccagcaagacctacctgtccaaaacactggcccagtatacctccaagacctgcagcaattgcggcttcaccatcaccagcgccgactacgacagagtgctggaaaagctcaagaaaaccgccaccggctggatgaccaccatcaacggcaaagagctgaaggttgagggccagatcacctactacaacaggtacaagaggcagaacgtcgtgaaggatctgagcgtggaactggacagactgagcgaagagagcgtgaacaacgacatcagcagctggacaaagggcagatcaggcgaggctctgagcctgctgaagaagaggtttagccacagacctgtgcaagagaagttcgtgtgcctgaactgcggcttcgagacacacgccgatgaacaggctgccctgaacattgccagaagctggctgttcctgagaagccaagagtacaagaagtaccagaccaacaagaccaccggcaacaccgacaagagggcctttgtggaaacctggcagagcttctacagaaaaaagctgaaagaagtctggaagcccgccgtg

SEQ ID NO: 1042 - DNA, 2934 bp, synthetic construct
  misc_feature 1..2934: note = CasX 672 variant
  source 1..2934: mol_type = other DNA
caagagatcaagagaatcaacaagatcagaaggagactggtcaaggacagcaacacaaagaaggccggcaagacaggccccatgaaaaccctgctcgtcagagtgatgacccctgacctgagagagcggctggaaaacctgagaaagaagcccgagaacatccctcagcctatcagcaacaccagcagggccaacctgaacaagctgctgaccgactacaccgagatgaagaaagccatcctgcacgtgtactgggaagagttccagaaagaccccgtgggcctgatgagcagagttgctcagcctgccagcaagaagatcgaccagaacaagctgaagcccgagatggacgagaagggcaatctgaccacagccggctttgcctgctctcagtgtggccagcctctgttcgtgtacaagctggaacaggtgtccgagaaaggcaaggcctacaccaactacttcggcagatgtaacgtggccgagcacgagaagctgattaagctggcccagctgaaacctgagaaggactctgatgaggccgtgacctacagcctgggcaagtttggacagagagccctggacttctacagcatccacgtgaccaaagaaagcacacaccccgtgaagcccctggctcagatcgccggcaatagatacgcctcttcccctgtgggcaaagccctgtccgatgcctgcatgggaacaatcgccagcttcctgagcaagtaccaggacatcatcatcgagcaccagaaggtggtcaagggcaaccagaagagactggaaagcctgagggagctggccggcaaagagaacctggaataccccagcgtgaccctgcctcctcagcctcacacaaaagaaggcgtggacgcctacaacgaagtgatcgccagagtgagaatgtgggtcaacctgaacctgtggcagaagctgaaactgtccagggacgacgccaagcctctgctgagactgaagggcttccctagcttccctctggtggaaagacaggccaatgaagtggattggtgggacatggtctgcaacgtgaagaagctgatcaacgagaagaaagaggatggcaaggttttctggcagaacctggccggctacaagagacaagaagccctgaggccttacctgagcagcgaagaggaccggaagaagggcaagaagttcgccagataccagctgggcgacctgctgctgcacctggaaaagaagcacggcgaggactggggcaaagtgtacgatgaggcctgggagagaatcgacaagaaggtggaaggcctgagcaagcacattaagctggaagaggaaagaaggagcgaggacgcccaatctaaagccgctctgaccgattggctgagagccaaggccagctttgtgatcgagggcctgaaagaggccgacaaggacgagttctgcagatgcgagctgaagctgcagaagtggtacggcgatctgagaggcaagcccttcgccattgaggccgagaacagcatcctggacatcagcggcttcagcaagcagtacaactgcgccttcatttggcagaaagacggcgtcaagaaactgaacctgtacctgatcatcaattacttcaaaggcggcaagctgcggttcaagaagatcaaacccgaggccttcgaggctaacagattctacaccgtgatcaacaaaaagtccggcgagatcgtgcccatggaagtgaacttcaacttcgacgaccccaacctgattatcctgcctctggccttcggcaagagacagggcagagagttcatctggaacgatctgctgagcctggaaaccggctctctgaagctggccaatggcagagtgatcgagaaaaccctgtacaacaggagaaccagacaggacgagcctgctctgtttgtggccctgaccttcgagagaagagaggtgctggacagcagcaacatcaagcccatgaacctgatcggcgtggaccggggcgagaatatccctgctgtgatcgccctgacagaccctgaaggatgcccactgagcagattcaaggactccctgggcaaccctacacacatcctgagaatcggcgagagctacaaagagaagcagaggacaatccaggccaagaaagaggtggaacagagaagagccggcggatactctaggaagtacgccagcaaggccaagaatctggccgacgacatggtccgaaacaccgccagagatctgctgtactacgccgtgacacaggacgccatgctgatcttcgagaatctgagcagaggcttcggccggcagggcaagagaacctttatggccgagaggcagtacaccagaatggaagattggctcacagctaaactggcctacgagggactgcccagcaagacctacctgtccaaaacactggcccagtatacctccaagacctgcagcaattgcggcttcaccatcaccagcgccgactacgacagagtgctggaaaagctcaagaaaaccgccaccggctggatgaccaccatcaacggcaaagagctgaaggttgagggccagatcacctactacaacaggtacaagaggcagaacgtcgtgaaggatctgagcgtggaactggacagactgagcgaagagagcgtgaacaacgacatcagcagctggacaaagggcagatcaggcgaggctctgagcctgctgaagaagaggtttagccacagacctgtgcaagagaagttcgtgtgcctgaactgcggcttcgagacacacgccgatgaacaggctgccctgaacattgccagaagctggctgttcctgagaagccaagagtacaagaagtaccagaccaacaagaccaccggcaacaccgacaagagggcctttgtggaaacctggcagagcttctacagaaaaaagctgaaagaagtctggaagcccgccgtg

SEQ ID NO: 1043 - DNA, 2937 bp, synthetic construct
  misc_feature 1..2937: note = CasX 676 variant
  source 1..2937: mol_type = other DNA
caagagatcaagagaatcaacaagatcagaaggagactggtcaaggacagcaacacaaagaaggccggcaagacacggggccccatgaaaaccctgctcgtcagagtgatgacccctgacctgagagagcggctggaaaacctgagaaagaagcccgagaacatccctcagcctatcagcaacaccagcagggccaacctgaacaagctgctgaccgactacaccgagatgaagaaagccatcctgcacgtgtactgggaagagttccagaaagaccccgtgggcctgatgagcagagttgctcagcctgccagcaagaagatcgaccagaacaagctgaagcccgagatggacgagaagggcaatctgaccacagccggctttgcctgctctcagtgtggccagcctctgttcgtgtacaagctggaacaggtgtccgagaaaggcaaggcctacaccaactacttcggcagatgtaacgtggccgagcacgagaagctgattaagctggcccagctgaaacctgagaaggactctgatgaggccgtgacctacagcctgggcaagtttggacagagagccctggacttctacagcatccacgtgaccaaagaaagcacacaccccgtgaagcccctggctcagatcgccggcaatagatacgcctcttcccctgtgggcaaagccctgtccgatgcctgcatgggaacaatcgccagcttcctgagcaagtaccaggacatcatcatcgagcaccagaaggtggtcaagggcaaccagaagagactggaaagcctgagggagctggccggcaaagagaacctggaataccccagcgtgaccctgcctcctcagcctcacacaaaagaaggcgtggacgcctacaacgaagtgatcgccagagtgagaatgtgggtcaacctgaacctgtggcagaagctgaaactgtccagggacgacgccaagcctctgctgagactgaagggcttccctagcttccctctggtggaaagacaggccaatgaagtggattggtgggacatggtctgcaacgtgaagaagctgatcaacgagaagaaagaggatggcaaggttttctggcagaacctggccggctacaagagacaagaagccctgaggccttacctgagcagcgaagaggaccggaagaagggcaagaagttcgccagataccagctgggcgacctgctgctgcacctggaaaagaagcacggcgaggactggggcaaagtgtacgatgaggcctgggagagaatcgacaagaaggtggaaggcctgagcaagcacattaagctggaagaggaaagaaggagcgaggacgcccaatctaaagccgctctgaccgattggctgagagccaaggccagctttgtgatcgagggcctgaaagaggccgacaaggacgagttctgcagatgcgagctgaagctgcagaagtggtacggcgatctgagaggcaagcccttcgccattgaggccgagaacagcatcctggacatcagcggcttcagcaagcagtacaactgcgccttcatttggcagaaagacggcgtcaagaaactgaacctgtacctgatcatcaattacttcaaaggcggcaagctgcggttcaagaagatcaaacccgaggccttcgaggctaacagattctacaccgtgatcaacaaaaagtccggcgagatcgtgcccatggaagtgaacttcaacttcgacgaccccaacctgattatcctgcctctggccttcggcaagagacagggcagagagttcatctggaacgatctgctgagcctggaaaccggctctctgaagctggccaatggcagagtgatcgagaaaaccctgtacaacaggagaaccagacaggacgagcctgctctgtttgtggccctgaccttcgagagaagagaggtgctggacagcagcaacatcaagcccatgaacctgatcggcgtggaccggggcgagaatatccctgctgtgatcgccctgacagaccctgaaggatgcccactgagcagattcaaggactccctgggcaaccctacacacatcctgagaatcggcgagagctacaaagagaagcagaggacaatccaggccaagaaagaggtggaacagagaagagccggcggatactctaggaagtacgccagcaaggccaagaatctggccgacgacatggtccgaaacaccgccagagatctgctgtactacgccgtgacacaggacgccatgctgatcttcgagaatctgagcagaggcttcggccggcagggcaagagaacctttatggccgagaggcagtacaccagaatggaagattggctcacagctaaactggcctacgagggactgcccagcaagacctacctgtccaaaacactggcccagtatacctccaagacctgcagcaattgcggcttcaccatcaccagcgccgactacgacagagtgctggaaaagctcaagaaaaccgccaccggctggatgaccaccatcaacggcaaagagctgaaggttgagggccagatcacctactacaacaggtacaagaggcagaacgtcgtgaaggatctgagcgtggaactggacagactgagcgaagagagcgtgaacaacgacatcagcagctggacaaagggcagatcaggcgaggctctgagcctgctgaagaagaggtttagccacagacctgtgcaagagaagttcgtgtgcctgaactgcggcttcgagacacacgccgatgaacaggctgccctgaacattgccagaagctggctgttcctgagaagccaagagtacaagaagtaccagaccaacaagaccaccggcaacaccgacaagagggcctttgtggaaacctggcagagcttctacagaaaaaagctgaaagaagtctggaagcccgccgtg

SEQ ID NO: 1044 - DNA, 2937 bp, synthetic construct
  misc_feature 1..2937: note = CasX 677 variant
  source 1..2937: mol_type = other DNA
caagagatcaagagaatcaacaagatcagaaggagactggtcaaggacagcaacacaaagaaggccggcaagacacggggccccatgaaaaccctgctcgtcagagtgatgacccctgacctgagagagcggctggaaaacctgagaaagaagcccgagaacatccctcagcctatcagcaacaccagcagggccaacctgaacaagctgctgaccgactacaccgagatgaagaaagccatcctgcacgtgtactgggaagagttccagaaagaccccgtgggcctgatgagcagagttgctcagcctgccagcaagaagatcgaccagaacaagctgaagcccgagatggacgagaagggcaatctgaccacagccggctttgcctgctctcagtgtggccagcctctgttcgtgtacaagctggaacaggtgtccgagaaaggcaaggcctacaccaactacttcggcagatgtaacgtggccgagcacgagaagctgattaagctggcccagctgaaacctgagaaggactctgatgaggccgtgacctacagcctgggcaagtttggacagagagccctggacttctacagcatccacgtgaccaaagaaagcacacaccccgtgaagcccctggctcagatcgccggcaatagatacgcctcttcccctgtgggcaaagccctgtccggcgcctgcatgggaacaatcgccagcttcctgagcaagtaccaggacatcatcatcgagcaccagaaggtggtcaagggcaaccagaagagactggaaagcctgagggagctggccggcaaagagaacctggaataccccagcgtgaccctgcctcctcagcctcacacaaaagaaggcgtggacgcctacaacgaagtgatcgccagagtgagaatgtgggtcaacctgaacctgtggcagaagctgaaactgtccagggacgacgccaagcctctgctgagactgaagggcttccctagcttccctctggtggaaagacaggccaatgaagtggattggtgggacatggtctgcaacgtgaagaagctgatcaacgagaagaaagaggatggcaaggttttctggcagaacctggccggctacaagagacaagaagccctgaggccttacctgagcagcgaagaggaccggaagaagggcaagaagttcgccagataccagctgggcgacctgctgctgcacctggaaaagaagcacggcgaggactggggcaaagtgtacgatgaggcctgggagagaatcgacaagaaggtggaaggcctgagcaagcacattaagctggaagaggaaagaaggagcgaggacgcccaatctaaagccgctctgaccgattggctgagagccaaggccagctttgtgatcgagggcctgaaagaggccgacaaggacgagttctgcagatgcgagctgaagctgcagaagtggtacggcgatctgagaggcaagcccttcgccattgaggccgagaacagcatcctggacatcagcggcttcagcaagcagtacaactgcgccttcatttggcagaaagacggcgtcaagaaactgaacctgtacctgatcatcaattacttcaaaggcggcaagctgcggttcaagaagatcaaacccgaggccttcgaggctaacagattctacaccgtgatcaacaaaaagtccggcgagatcgtgcccatggaagtgaacttcaacttcgacgaccccaacctgattatcctgcctctggccttcggcaagagacagggcagagagttcatctggaacgatctgctgagcctggaaaccggctctctgaagctggccaatggcagagtgatcgagaaaaccctgtacaacaggagaaccagacaggacgagcctgctctgtttgtggccctgaccttcgagagaagagaggtgctggacagcagcaacatcaagcccatgaacctgatcggcgtggaccggggcgagaatatccctgctgtgatcgccctgacagaccctgaaggatgcccactgagcagattcaaggactccctgggcaaccctacacacatcctgagaatcggcgagagctacaaagagaagcagaggacaatccaggccaagaaagaggtggaacagagaagagccggcggatactctaggaagtacgccagcaaggccaagaatctggccgacgacatggtccgaaacaccgccagagatctgctgtactacgccgtgacacaggacgccatgctgatcttcgagaatctgagcagaggcttcggccggcagggcaagagaacctttatggccgagaggcagtacaccagaatggaagattggctcacagctaaactggcctacgagggactgcccagcaagacctacctgtccaaaacactggcccagtatacctccaagacctgcagcaattgcggcttcaccatcaccagcgccgactacgacagagtgctggaaaagctcaagaaaaccgccaccggctggatgaccaccatcaacggcaaagagctgaaggttgagggccagatcacctactacaacaggtacaagaggcagaacgtcgtgaaggatctgagcgtggaactggacagactgagcgaagagagcgtgaacaacgacatcagcagctggacaaagggcagatcaggcgaggctctgagcctgctgaagaagaggtttagccacagacctgtgcaagagaagttcgtgtgcctgaactgcggcttcgagacacacgccgatgaacaggctgccctgaacattgccagaagctggctgttcctgagaagccaagagtacaagaagtaccagaccaacaagaccaccggcaacaccgacaagagggcctttgtggaaacctggcagagcttctacagaaaaaagctgaaagaagtctggaagcccgccgtg

SEQ ID NO: 1045 - protein, 977 aa, synthetic construct; identical to SEQ ID NO: 89
  REGION 1..977: note = CasX 488 variant

SEQ ID NO: 1046 - protein, 977 aa, synthetic construct; identical to SEQ ID NO: 90
  REGION 1..977: note = CasX 491 variant

SEQ ID NO: 1047 - protein, 978 aa, synthetic construct; identical to SEQ ID NO: 91
  REGION 1..978: note = CasX 515 variant

SEQ ID NO: 1048 - protein, 978 aa, synthetic construct; identical to SEQ ID NO: 92
  REGION 1..978: note = CasX 527 variant

SEQ ID NO: 1049 - protein, 978 aa, synthetic construct; identical to SEQ ID NO: 93
  REGION 1..978: note = CasX 535

SEQ ID NO: 1050 - protein, 978 aa, synthetic construct; identical to SEQ ID NO: 94
  REGION 1..978: note = CasX 536 variant

SEQ ID NO: 1051 - protein, 978 aa, synthetic construct; identical to SEQ ID NO: 95
  REGION 1..978: note = CasX 537 variant

SEQ ID NO: 1052 - protein, 978 aa, synthetic construct; identical to SEQ ID NO: 96
  REGION 1..978: note = CasX 583 variant

SEQ ID NO: 1053 - protein, 977 aa, synthetic construct; identical to SEQ ID NO: 97
  REGION 1..977: note = CasX 660 variant

SEQ ID NO: 1054 - protein, 977 aa, synthetic construct; identical to SEQ ID NO: 98
  REGION 1..977: note = CasX 661

SEQ ID NO: 1055 - protein, 977 aa, synthetic construct; identical to SEQ ID NO: 99
  REGION 1..977: note = CasX 662 variant

SEQ ID NO: 1056 - protein, 977 aa, synthetic construct; identical to SEQ ID NO: 100
  REGION 1..977: note = CasX 663 variant

SEQ ID NO: 1057 - protein, 977 aa, synthetic construct; identical to SEQ ID NO: 101
  REGION 1..977: note = CasX 664 variant

SEQ ID NO: 1058 - protein, 979 aa, synthetic construct; identical to SEQ ID NO: 567
  REGION 1..979: note = CasX 668 variant

SEQ ID NO: 1059 - protein, 979 aa, synthetic construct
  REGION 1..979: note = CasX 670 variant
QEIKRINKIRRRLVKDSNTKKAGKTRGPMKTLLVRVMTPDLRERLENLRKKPENIPQPISNTSRANLNKLLTDYTEMKKAILHVYWEEFQKDPVGLMSRVAQPASKKIDQNKLKPEMDEKGNLTTAGFACSQCGQPLFVYKLEQVSEKGKAYTNYFGRCNVAEHEKLILLAQLKPEKDSDEAVTYSLGKFGQRALDFYSIHVTKESTHPVKPLAQIAGNRYASSPVGKALSGACMGTIASFLSKYQDIIIEHQKVVKGNQKRLESLRELAGKENLEYPSVTLPPQPHTKEGVDAYNEVIARVRMWVNLNLWQKLKLSRDDAKPLLRLKGFPSFPLVERQANEVDWWDMVCNVKKLINEKKEDGKVFWQNLAGYKRQEALRPYLSSEEDRKKGKKFARYQLGDLLLHLEKKHGEDWGKVYDEAWERIDKKVEGLSKHIKLEEERRSEDAQSKAALTDWLRAKASFVIEGLKEADKDEFCRCELKLQKWYGDLRGKPFAIEAENSILDISGFSKQYNCAFIWQKDGVKKLNLYLIINYFKGGKLRFKKIKPEAFEANRFYTVINKKSGEIVPMEVNFNFDDPNLIILPLAFGKRQGREFIWNDLLSLETGSLKLANGRVIEKTLYNRRTRQDEPALFVALTFERREVLDSSNIKPMNLIGVDRGENIPAVIALTDPEGCPLSRFKDSLGNPTHILRIGESYKEKQRTIQAKKEVEQRRAGGYSRKYASKAKNLADDMVRNTARDLLYYAVTQDAMLIFENLSRGFGRQGKRTFMAERQYTRMEDWLTAKLAYEGLPSKTYLSKTLAQYTSKTCSNCGFTITSADYDRVLEKLKKTATGWMTTINGKELKVEGQITYYNRYKRQNVVKDLSVELDRLSEESVNNDISSWTKGRSGEALSLLKKRFSHRPVQEKFVCLNCGFETHADEQAALNIARSWLFLRSQEYKKYQTNKTTGNTDKRAFVETWQSFYRKKLKEVWKPAV

SEQ ID NO: 1060 - protein, 978 aa, synthetic construct; identical to SEQ ID NO: 570
  REGION 1..978: note = CasX 672 variant

SEQ ID NO: 1061 - protein, 979 aa, synthetic construct; identical to SEQ ID NO: 574
  REGION 1..979: note = CasX 676 variant

SEQ ID NO: 1062 - protein, 979 aa, synthetic construct; identical to SEQ ID NO: 575
  REGION 1..979: note = CasX 677 variant

SEQ ID NO: 1063 - RNA, 130 nt, synthetic construct
  misc_feature 1..130: note = sgRNA
  source 1..130: mol_type = other RNA
ggtactggcgcttttatctcattactttgagagccatcaccagcgactatgtcgtatgggtaaagcgcttatttatcggagagaaatccgataaataagaagcatcaaagggccgagatgtctcgctccg

SEQ ID NO: 1064 - RNA, 107 nt, synthetic construct
  misc_feature 1..107: note = sgRNA
  source 1..107: mol_type = other RNA
ggtactggcgcttttatctcattactttgagagccatcaccagcgactatgtcgtatgggtaaagcgccctcttcggagggaagcatcaaagggccgagatgtctcg

SEQ ID NO: 1065 - RNA, 120 nt, synthetic construct
  misc_feature 1..120: note = sgRNA
  source 1..120: mol_type = other RNA
ggtactggcgcctttatctcattactttgagagccatcaccagcgactatgtcgtatgggtaaagcgcttacggacttcggtccgtaagaagcatcaaagggccgagatgtctcgctccg

SEQ ID NO: 1066 - RNA, 109 nt, synthetic construct
  misc_feature 1..109: note = sgRNA
  source 1..109: mol_type = other RNA
actggcgcttttatctgattactttgagagccatcaccagcgactatgtcgtagtgggtaaagctccctcttcggagggagcatcaaagggccgagatgtctcgctccg

SEQ ID NO: 1067 - RNA, 99 nt, synthetic construct
  misc_feature 1..99: note = sgRNA
  source 1..99: mol_type = other RNA
actggcgcttctatctgattactctgagcgccatcaccagcgactatgtcgtagtgggtaaagccgcttacggacttcggtccgtaagaggcatcagag

SEQ ID NO: 1068 - DNA, 60 bp, synthetic construct; identical to SEQ ID NO: 103
  misc_feature 1..60: note = cleavage substrate
  source 1..60: mol_type = other DNA

SEQ ID NO: 1069 - DNA, 60 bp, synthetic construct; identical to SEQ ID NO: 28
  misc_feature 1..60: note = cleavage substrate
  source 1..60: mol_type = other DNA

SEQ ID NO: 1070 - DNA, 60 bp, synthetic construct; identical to SEQ ID NO: 105
  misc_feature 1..60: note = cleavage substrate
  source 1..60: mol_type = other DNA

SEQ ID NO: 1071 - DNA, 60 bp, synthetic construct; identical to SEQ ID NO: 106
  misc_feature 1..60: note = cleavage substrate
  source 1..60: mol_type = other DNA

SEQ ID NO: 1072 - DNA, 60 bp, synthetic construct; identical to SEQ ID NO: 107
  misc_feature 1..60: note = cleavage substrate
  source 1..60: mol_type = other DNA

SEQ ID NO: 1073 - DNA, 60 bp, synthetic construct; identical to SEQ ID NO: 108
  misc_feature 1..60: note = cleavage substrate
  source 1..60: mol_type = other DNA

SEQ ID NO: 1074 - DNA, 60 bp, synthetic construct; identical to SEQ ID NO: 109
  misc_feature 1..60: note = cleavage substrate
  source 1..60: mol_type = other DNA

SEQ ID NO: 1075 - DNA, 60 bp, synthetic construct; identical to SEQ ID NO: 110
  misc_feature 1..60: note = cleavage substrate
  source 1..60: mol_type = other DNA

SEQ ID NO: 1076 - DNA, 60 bp, synthetic construct; identical to SEQ ID NO: 119
  misc_feature 1..60: note = cleavage substrate
  source 1..60: mol_type = other DNA

SEQ ID NO: 1077 - DNA, 60 bp, synthetic construct; identical to SEQ ID NO: 120
  misc_feature 1..60: note = cleavage substrate
  source 1..60: mol_type = other DNA

SEQ ID NO: 1078 - DNA, 60 bp, synthetic construct; identical to SEQ ID NO: 121
  misc_feature 1..60: note = cleavage substrate
  source 1..60: mol_type = other DNA

SEQ ID NO: 1079 - DNA, 60 bp, synthetic construct; identical to SEQ ID NO: 122
  misc_feature 1..60: note = cleavage substrate
  source 1..60: mol_type = other DNA

SEQ ID NO: 1080 - DNA, 60 bp, synthetic construct; identical to SEQ ID NO: 123
  misc_feature 1..60: note = cleavage substrate
  source 1..60: mol_type = other DNA

SEQ ID NO: 1081 - DNA, 60 bp, synthetic construct; identical to SEQ ID NO: 124
  misc_feature 1..60: note = cleavage substrate
  source 1..60: mol_type = other DNA

SEQ ID NO: 1082 - DNA, 60 bp, synthetic construct; identical to SEQ ID NO: 125
  misc_feature 1..60: note = cleavage substrate
  source 1..60: mol_type = other DNA

SEQ ID NO: 1083 - DNA, 60 bp, synthetic construct; identical to SEQ ID NO: 126
  misc_feature 1..60: note = cleavage substrate
  source 1..60: mol_type = other DNA

SEQ ID NO: 1084 - DNA, 20 bp, synthetic construct
  misc_feature 1..20: note = sgRNA spacer
  source 1..20: mol_type = other DNA
ggccgagatgtctcgctccg

SEQ ID NO: 1085 - DNA, 20 bp, synthetic construct
  misc_feature 1..20: note = sgRNA spacer
  source 1..20: mol_type = other DNA
ggccgagatgtctcgctccg

SEQ ID NO: 1086 - DNA, 18 bp, synthetic construct
  misc_feature 1..18: note = sgRNA spacer
  source 1..18: mol_type = other DNA
ggccgagatgtctcgctc

SEQ ID NO: 1087 - DNA, 19 bp, synthetic construct
  misc_feature 1..19: note = sgRNA spacer
  source 1..19: mol_type = other DNA
ggccgagatgtctcgctcc

SEQ ID NO: 1088 - DNA, 87 bp, synthetic construct; identical to SEQ ID NO: 167
  misc_feature 1..87: note = scaffold 174 template fwd primer
  source 1..87: mol_type = other DNA

SEQ ID NO: 1089 - DNA, 50 bp, synthetic construct; identical to SEQ ID NO: 168
  misc_feature 1..50: note = scaffold 174 template rev primer
  source 1..50: mol_type = other DNA

SEQ ID NO: 1090 - DNA, 36 bp, synthetic construct; identical to SEQ ID NO: 191
  misc_feature 1..36: note = scaffold 174 spacer primer
  source 1..36: mol_type = other DNA

SEQ ID NO: 1091 - DNA, 34 bp, synthetic construct; identical to SEQ ID NO: 192
  misc_feature 1..34: note = scaffold 174 spacer primer
  source 1..34: mol_type = other DNA

SEQ ID NO: 1092 - DNA, 35 bp, synthetic construct; identical to SEQ ID NO: 193
  misc_feature 1..35: note = scaffold 174 spacer primer
  source 1..35: mol_type = other DNA

SEQ ID NO: 1093 - DNA, 36 bp, synthetic construct; identical to SEQ ID NO: 170
  misc_feature 1..36: note = sgRNA spacer
  source 1..36: mol_type = other DNA

SEQ ID NO: 1094 - DNA, 35 bp, synthetic construct; identical to SEQ ID NO: 171
  misc_feature 1..35: note = sgRNA spacer
  source 1..35: mol_type = other DNA

SEQ ID NO: 1095 - DNA, 34 bp, synthetic construct; identical to SEQ ID NO: 172
  misc_feature 1..34: note = sgRNA spacer
  source 1..34: mol_type = other DNA

SEQ ID NO: 1096 - DNA, 36 bp, synthetic construct; identical to SEQ ID NO: 173
  misc_feature 1..36: note = sgRNA spacer
  source 1..36: mol_type = other DNA

SEQ ID NO: 1097 - DNA, 35 bp, synthetic construct; identical to SEQ ID NO: 174
  misc_feature 1..35: note = sgRNA spacer
  source 1..35: mol_type = other DNA

SEQ ID NO: 1098 - DNA, 34 bp, synthetic construct; identical to SEQ ID NO: 175
  misc_feature 1..34: note = sgRNA spacer
  source 1..34: mol_type = other DNA

SEQ ID NO: 1099 - RNA, 20 nt, synthetic construct
  misc_feature 1..20: note = sgRNA spacer
  source 1..20: mol_type = other RNA
caaacaaatgtgtcacaaag

SEQ ID NO: 1100 - RNA, 19 nt, synthetic construct
  misc_feature 1..19: note = sgRNA spacer
  source 1..19: mol_type = other RNA
caaacaaatgtgtcacaaa

SEQ ID NO: 1101 - RNA, 18 nt, synthetic construct
  misc_feature 1..18: note = sgRNA spacer
  source 1..18: mol_type = other RNA
caaacaaatgtgtcacaa

SEQ ID NO: 1102 - RNA, 20 nt, synthetic construct
  misc_feature 1..20: note = sgRNA spacer
  source 1..20: mol_type = other RNA
ggaataatgctgttgttgaa

SEQ ID NO: 1103 - RNA, 19 nt, synthetic construct
  misc_feature 1..19: note = sgRNA spacer
  source 1..19: mol_type = other RNA
ggaataatgctgttgttga

SEQ ID NO: 1104 - RNA, 18 nt, synthetic construct
  misc_feature 1..18: note = sgRNA spacer
  source 1..18: mol_type = other RNA
ggaataatgctgttgttg

SEQ ID NO: 1105 - RNA, 20 nt, synthetic construct
  misc_feature 1..20: note = sgRNA spacer
  source 1..20: mol_type = other RNA
ggccgagatgtctcgctccg

SEQ ID NO: 1106 - RNA, 20 nt, synthetic construct
  misc_feature 1..20: note = sgRNA spacer
  source 1..20: mol_type = other RNA
cgagacgtaattacgtctcg

SEQ ID NO: 1107 - protein, 977 aa, synthetic construct
  REGION 1..977: note = dCas096 variant
QEIKRINKIRRRLVKDSNTKKAGKTGPMKTLLVRVMTPDLRERLENLRKKPENIPQPISNTSRANLNKLLTDYTEMKKAILHVYWEEFQKDPVGLMSRVAQPASKKIDQNKLKPEMDEKGNLTTAGFACSQCGQPLFVYKLEQVSEKGKAYTNYFGRCNVAEHEKLILLAQLKPEKDSDEAVTYSLGKFGQRALDFYSIHVTKESTHPVKPLAQIAGNRYASGPVGKALSDACMGTIASFLSKYQDIIIEHQKVVKGNQKRLESLRELAGKENLEYPSVTLPPQPHTKEGVDAYNEVIARVRMWVNLNLWQKLKLSRDDAKPLLRLKGFPSFPLVERQANEVDWWDMVCNVKKLINEKKEDGKVFWQNLAGYKRQEALRPYLSSEEDRKKGKKFARYQLGDLLLHLEKKHGEDWGKVYDEAWERIDKKVEGLSKHIKLEEERRSEDAQSKAALTDWLRAKASFVIEGLKEADKDEFCRCELKLQKWYGDLRGKPFAIEAENSILDISGFSKQYNCAFIWQKDGVKKLNLYLIINYFKGGKLRFKKIKPEAFEANRFYTVINKKSGEIVPMEVNFNFDDPNLIILPLAFGKRQGREFIWNDLLSLETGSLKLANGRVIEKTLYNRRTRQDEPALFVALTFERREVLDSSNIKPMNLIGVARGENIPAVIALTDPEGCPLSRFKDSLGNPTHILRIGESYKEKQRTIQAKKEVEQRRAGGYSRKYASKAKNLADDMVRNTARDLLYYAVTQDAMLIFANLSRGFGRQGKRTFMAERQYTRMEDWLTAKLAYEGLSKTYLSKTLAQYTSKTCSNCGFTITSADYDRVLEKLKKTATGWMTTINGKELKVEGQITYYNRYKRQNVVKDLSVELDRLSEESVNNDISSWTKGRSGEALSLLKKRFSHRPVQEKFVCLNCGFETHAAEQAALNIARSWLFLRSQEYKKYQTNKTTGNTDKRAFVETWQSFYRKKLKEVWKPAV

SEQ ID NO: 1108 - protein, 979 aa, synthetic construct
  REGION 1..979: note = dCas401 variant
QEIKRINKIRRRLVKDSNTKKAGKTRGPMKTLLVRVMTPDLRERLENLRKKPENIPQPISNTSRANLNKLLTDYTEMKKAILHVYWEEFQKDPVGLMSRVAQPASKKIDQNKLKPEMDEKGNLTTAGFACSQCGQPLFVYKLEQVSEKGKAYTNYFGRCNVAEHEKLILLAQLKPEKDSDEAVTYSLGKFGQRALDFYSIHVTKESTHPVKPLAQIAGNRYASSPVGKALSDACMGTIASFLSKYQDIIIEHQKVVKGNQKRLESLRELAGKENLEYPSVTLPPQPHTKEGVDAYNEVIARVRMWVNLNLWQKLKLSRDDAKPLLRLKGFPSFPLVERQANEVDWWDMVCNVKKLINEKKEDGKVFWQNLAGYKRQEALRPYLSSEEDRKKGKKFARYQLGDLLLHLEKKHGEDWGKVYDEAWERIDKKVEGLSKHIKLEEERRSEDAQSKAALTDWLRAKASFVIEGLKEADKDEFCRCELKLQKWYGDLRGKPFAIEAENSILDISGFSKQYNCAFIWQKDGVKKLNLYLIINYFKGGKLRFKKIKPEAFEANRFYTVINKKSGEIVPMEVNFNFDDPNLIILPLAFGKRQGREFIWNDLLSLETGSLKLANGRVIEKTLYNRRTRQDEPALFVALTFERREVLDSSNIKPMNLIGVARGENIPAVIALTDPEGCPLSRFKDSLGNPTHILRIGESYKEKQRTIQAKKEVEQRRAGGYSRKYASKAKNLADDMVRNTARDLLYYAVTQDAMLIFANLSRGFGRQGKRTFMAERQYTRMEDWLTAKLAYEGLPSKTYLSKTLAQYTSKTCSNCGFTITSADYDRVLEKLKKTATGWMTTINGKELKVEGQITYYNRYKRQNVVKDLSVELDRLSEESVNNDISSWTKGRSGEALSLLKKRFSHRPVQEKFVCLNCGFETHAAEQAALNIARSWLFLRSQEYKKYQTNKTTGNTDKRAFVETWQSFYRKKLKEVWKPAV

SEQ ID NO: 1109 - protein, 972 aa, synthetic construct
  REGION 1..972: note = dCas142 varirant
QEIKRINKIRRRLVKDSNTKKAGKTRGPMKTLLVRVMTPDLRERLENLRKKPENIPQPISNTSRANLNKLLTDYTEMKKAILHVYWEEFQKDPVGLMSRVAQPASKKIDQNKLKPEMDEKGNLTTAGFACSQCGQPLFVYKLEQVSEKGKAYTNYFGRCNVAEHEKLILLAQLKPEKDSDEAVTYSLGKFGQRALDFYSIHVTKESTHPVKPLAQIAGNRYASGPVGKALSDACMGTIASFLSKYQDIIIEHQKVVKGNQKRLESLRELAGKENLEYPSVTLPPQPHTKEGVDAYNEVIARVRMWVNLNLWQKLKLSRDDAKPLLRLKGFPSFPLVERQANEVDWWDMVCNVKKLINEKKEDGKVFWQNLAGYKRQEALRPYLSSEEDRKKGKKFARYQLGDLLLHLEKKHGEDWGKVYDEAWERIDKKVEGLSKHIKLEEERRSEDAQSKAALTDWLRAKASFVIEGLKEADKDEFCRCELKLQKWYGDLRGKPFAIEAENSILDISGFSKQYNCAFIWQKDGVKKLNLYLIINYFKGGKLRFKKIKPEAFEANRFYTVINKKSGEIVPMEVNFNFDDPNLIILPLAFGKRQGREFIWNDLLSLETGSLKLANGRVIEKTLYNRRTRQDEPALFVALTFERREVLDSSNIKPMNLIGVARGENIPAVIALTDPEGCPLSRFKDSLGNPTHILRIGESYKEKQRTIQAKKEVEQRRAGGYSRKYASKAKNLADDMVRNTARDLLYYAVTQDAMLIFANLSRGFGRQGKRTFMAERQYTRMEDWLTAKLAYEGLSKTYLSKTLAQYTSKTCSNCGFTITSADYDRVLEKLKKTATGWMTTINGKELKVEGQITYYNRYKRQNVVKDLSVELDRLSEESVNNDISSWTKGRSGEALSLLKKRFSHRPVQEKFVCLNCGFETHAAEQAALNIARSWLFLRSQEYKKYQTNKTTGNTDKRAFVETWQSFYRKKLKE

SEQ ID NO: 1110 - protein, 979 aa, synthetic construct
  REGION 1..979: note = dCas402 variant
QEIKRINKIRRRLVKDSNTKKAGKTRGPMKTLLVRVMTPDLRERLENLRKKPENIPQPISNTSRANLNKLLTDYTEMKKAILHVYWEEFQKDPVGLMSRVAQPASKKIDQNKLKPEMDEKGNLTTAGFACSQCGQPLFVYKLEQVSEKGKAYTNYFGRCNVAEHEKLIKLAQLKPEKDSDEAVTYSLGKFGQRALDFYSIHVTKESTHPVKPLAQIAGNRYASSPVGKALSDACMGTIASFLSKYQDIIIEHQKVVKGNQKRLESLRELAGKENLEYPSVTLPPQPHTKEGVDAYNEVIARVRMWVNLNLWQKLKLSRDDAKPLLRLKGFPSFPLVERQANEVDWWDMVCNVKKLINEKKEDGKVFWQNLAGYKRQEALRPYLSSEEDRKKGKKFARYQLGDLLLHLEKKHGEDWGKVYDEAWERIDKKVEGLSKHIKLEEERRSEDAQSKAALTDWLRAKASFVIEGLKEADKDEFCRCELKLQKWYGDLRGKPFAIEAENSILDISGFSKQYNCAFIWQKDGVKKLNLYLIINYFKGGKLRFKKIKPEAFEANRFYTVINKKSGEIVPMEVNFNFDDPNLIILPLAFGKRQGREFIWNDLLSLETGSLKLANGRVIEKTLYNRRTRQDEPALFVALTFERREVLDSSNIKPMNLIGVARGENIPAVIALTDPEGCPLSRFKDSLGNPTHILRIGESYKEKQRTIQAKKEVEQRRAGGYSRKYASKAKNLADDMVRNTARDLLYYAVTQDAMLIFANLSRGFGRQGKRTFMAERQYTRMEDWLTAKLAYEGLPSKTYLSKTLAQYTSKTCSNCGFTITSADYDRVLEKLKKTATGWMTTINGKELKVEGQITYYNRYKRQNVVKDLSVELDRLSEESVNNDISSWTKGRSGEALSLLKKRFSHRPVQEKFVCLNCGFETHAAEQAALNIARSWLFLRSQEYKKYQTNKTTGNTDKRAFVETWQSFYRKKLKEVWKPAV

SEQ ID NO: 1111 - DNA, 1763 bp, synthetic construct
  misc_feature 1..1763: note = Gag-(-1)-PR
  source 1..1763: mol_type = other DNA
atgggtgcgagagcgtcagtattaagcgggggagaattagatcgatgggaaaaaattcggttaaggccagggggaaagaaaaaatataaattaaaacatatagtatgggcaagcagggagctagaacgattcgcagttaatcctggcctgttagaaacatcagaaggctgtagacaaatactgggacagctacaaccatcccttcagacaggatcagaagaacttagatcattatataatacagtagcaaccctctattgtgtgcatcaaaggatagagataaaagacaccaaggaagctttagacaagatagaggaagagcaaaacaaaagtaagaaaaaagcacagcaagcagcagctgacacaggacacagcaatcaggtcagccaaaattaccctatagtgcagaacatccaggggcaaatggtacatcaggccatatcacctagaactttaaatgcatgggtaaaagtagtagaagagaaggctttcagcccagaagtgatacccatgttttcagcattatcagaaggagccaccccacaagatttaaacaccatgctaaacacagtggggggacatcaagcagccatgcaaatgttaaaagagaccatcaatgaggaagctgcagaatgggatagagtgcatccagtgcatgcagggcctattgcaccaggccagatgagagaaccaaggggaagtgacatagcaggaactactagtacccttcaggaacaaataggatggatgacacataatccacctatcccagtaggagaaatctataaaagatggataatcctgggattaaataaaatagtaagaatgtatagccctaccagcattctggacataagacaaggaccaaaggaaccctttagagactatgtagaccgattctataaaactctaagagccgagcaagcttcacaagaggtaaaaaattggatgacagaaaccttgttggtccaaaatgcgaacccagattgtaagactattttaaaagcattgggaccaggagcgacactagaagaaatgatgacagcatgtcagggagtggggggacccggccataaagcaagagttttggctgaagcaatgagccaagtaacaaatccagctaccataatgatacagaaaggcaattttaggaaccaaagaaagactgttaagtgtttcaattgtggcaaagaagggcacatagccaaaaattgcagggcccctaggaaaaagggctgttggaaatgtggaaaggaaggacaccaaatgaaagattgtactgagagacaggctaattttttagggaagatctggccttcccacaagggaaggccagggaattttcttcagagcagaccagagccaacagccccaccagaagagagcttcaggtttggggaagagacaacaactccctctcagaagcaggagccgatagacaaggaactgtatcctttagcttccctcagatcactctttggcagcgacccctcgtcacaataaagataggggggcaattaaaggaagctctattagatacaggagcagatgatacagtattagaagaaatgaatttgccaggaagatggaaaccaaaaatgatagggggaattggaggttttatcaaagtaagacagtatgatcagatactcatagaaatctgcggacataaagctataggtacagtattagtaggacctacacctgtcaacataattggaagaaatctgttgactcagattggctgcactttaaatttttaa

SEQ ID NO: 1112 - DNA, 1902 bp, synthetic construct
  misc_feature 1..1902: note = Gag-MS2
  source 1..1902: mol_type = other DNA
gccaccatgggtgcgagagcgtcagtattaagcgggggagaattagatcgatgggaaaaaattcggttaaggccagggggaaagaaaaaatataaattaaaacatatagtatgggcaagcagggagctagaacgattcgcagttaatcctggcctgttagaaacatcagaaggctgtagacaaatactgggacagctacaaccatcccttcagacaggatcagaagaacttagatcattatataatacagtagcaaccctctattgtgtgcatcaaaggatagagataaaagacaccaaggaagctttagacaagatagaggaagagcaaaacaaaagtaagaaaaaagcacagcaagcagcagctgacacaggacacagcaatcaggtcagccaaaattaccctatagtgcagaacatccaggggcaaatggtacatcaggccatatcacctagaactttaaatgcatgggtaaaagtagtagaagagaaggctttcagcccagaagtgatacccatgttttcagcattatcagaaggagccaccccacaagatttaaacaccatgctaaacacagtggggggacatcaagcagccatgcaaatgttaaaagagaccatcaatgaggaagctgcagaatgggatagagtgcatccagtgcatgcagggcctattgcaccaggccagatgagagaaccaaggggaagtgacatagcaggaactactagtacccttcaggaacaaataggatggatgacacataatccacctatcccagtaggagaaatctataaaagatggataatcctgggattaaataaaatagtaagaatgtatagccctaccagcattctggacataagacaaggaccaaaggaaccctttagagactatgtagaccgattctataaaactctaagagccgagcaagcttcacaagaggtaaaaaattggatgacagaaaccttgttggtccaaaatgcgaacccagattgtaagactattttaaaagcattgggaccaggagcgacactagaagaaatgatgacagcatgtcagggagtggggggacccggccataaagcaagagttttggctgaagcaatgagccaagtaacaaatccagctaccataatgatacagaaaggcaattttaggaaccaaagaaagactgttaagtgtttcaattgtggcaaagaagggcacatagccaaaaattgcagggcccctaggaaaaagggctgttggaaatgtggaaaggaaggacaccaaatgaaagattgtactgagagacaggctaattttttagggaagatctggccttcccacaagggaaggccagggaattttcttcagagcagaccagagccaacagccccaccagaagagagcttcaggtttggggaagagacaacaactccctctcagaagcaggagccgatagacaaggaactgtatcctttagcttccctcagatcactctttggcagcgacccctcgtcacaaatggcgtcaaacttcacgcagtttgtcctcgttgacaacggggggactggcgatgtcacagtggctcccagtaacttcgcgaatggcgtcgccgaatggatcagcagtaactctcggtctcaggcatacaaggtcacctgttccgtgcgccaatcatctgcccagaacaggaaatacaccattaaggtggaggtgccaaaggtcgccacccagactgtgggaggggtggagctgcctgtggccgcctggaggtcatacctcaacatggagctcaccatacctatattcgcaaccaattccgactgcgaattgatcgtcaaagcgatgcagggcctcctgaaggatggtaacccaattccgagtgcaatcgcagctaacagcggcatttacttataa

SEQ ID NO: 1113 - DNA, 1902 bp, synthetic construct
  misc_feature 1..1902: note = Gag-MS2 N55K
  source 1..1902: mol_type = other DNA
gccaccatgggtgcgagagcgtcagtattaagcgggggagaattagatcgatgggaaaaaattcggttaaggccagggggaaagaaaaaatataaattaaaacatatagtatgggcaagcagggagctagaacgattcgcagttaatcctggcctgttagaaacatcagaaggctgtagacaaatactgggacagctacaaccatcccttcagacaggatcagaagaacttagatcattatataatacagtagcaaccctctattgtgtgcatcaaaggatagagataaaagacaccaaggaagctttagacaagatagaggaagagcaaaacaaaagtaagaaaaaagcacagcaagcagcagctgacacaggacacagcaatcaggtcagccaaaattaccctatagtgcagaacatccaggggcaaatggtacatcaggccatatcacctagaactttaaatgcatgggtaaaagtagtagaagagaaggctttcagcccagaagtgatacccatgttttcagcattatcagaaggagccaccccacaagatttaaacaccatgctaaacacagtggggggacatcaagcagccatgcaaatgttaaaagagaccatcaatgaggaagctgcagaatgggatagagtgcatccagtgcatgcagggcctattgcaccaggccagatgagagaaccaaggggaagtgacatagcaggaactactagtacccttcaggaacaaataggatggatgacacataatccacctatcccagtaggagaaatctataaaagatggataatcctgggattaaataaaatagtaagaatgtatagccctaccagcattctggacataagacaaggaccaaaggaaccctttagagactatgtagaccgattctataaaactctaagagccgagcaagcttcacaagaggtaaaaaattggatgacagaaaccttgttggtccaaaatgcgaacccagattgtaagactattttaaaagcattgggaccaggagcgacactagaagaaatgatgacagcatgtcagggagtggggggacccggccataaagcaagagttttggctgaagcaatgagccaagtaacaaatccagctaccataatgatacagaaaggcaattttaggaaccaaagaaagactgttaagtgtttcaattgtggcaaagaagggcacatagccaaaaattgcagggcccctaggaaaaagggctgttggaaatgtggaaaggaaggacaccaaatgaaagattgtactgagagacaggctaattttttagggaagatctggccttcccacaagggaaggccagggaattttcttcagagcagaccagagccaacagccccaccagaagagagcttcaggtttggggaagagacaacaactccctctcagaagcaggagccgatagacaaggaactgtatcctttagcttccctcagatcactctttggcagcgacccctcgtcacaaatggcgtcaaacttcacgcagtttgtcctcgttgacaacggggggactggcgatgtcacagtggctcccagtaacttcgcgaatggcgtcgccgaatggatcagcagtaactctcggtctcaggcatacaaggtcacctgttccgtgcgccaatcatctgcccagaagaggaaatacaccattaaggtggaggtgccaaaggtcgccacccagactgtgggaggggtggagctgcctgtggccgcctggaggtcatacctcaacatggagctcaccatacctatattcgcaaccaattccgactgcgaattgatcgtcaaagcgatgcagggcctcctgaaggatggtaacccaattccgagtgcaatcgcagctaacagcggcatttacttataa

SEQ ID NO: 1114 - DNA, 3117 bp, synthetic construct
  misc_feature 1..3117: note = CasX 491 variant with NLS
  source 1..3117: mol_type = other DNA
gccaccatgcccgcggccaaaagggtgaaattggacggagggaagcgcacggccgacggcagtgaattcgagtctccaaagaagaagcgcaaagttggtggcggctccggcggtggatctcccggctctagagatatctctagacaagagatcaagagaatcaacaagatcagaaggagactggtcaaggacagcaacacaaagaaggccggcaagacaggccccatgaaaaccctgctcgtcagagtgatgacccctgacctgagagagcggctggaaaacctgagaaagaagcccgagaacatccctcagcctatcagcaacaccagcagggccaacctgaacaagctgctgaccgactacaccgagatgaagaaagccatcctgcacgtgtactgggaagagttccagaaagaccccgtgggcctgatgagcagagttgctcagcctgccagcaagaagatcgaccagaacaagctgaagcccgagatggacgagaagggcaatctgaccacagccggctttgcctgctctcagtgtggccagcctctgttcgtgtacaagctggaacaggtgtccgagaaaggcaaggcctacaccaactacttcggcagatgtaacgtggccgagcacgagaagctgattctgctggcccagctgaaacctgagaaggactctgatgaggccgtgacctacagcctgggcaagtttggacagagagccctggacttctacagcatccacgtgaccaaagaaagcacacaccccgtgaagcccctggctcagatcgccggcaatagatacgcctctggacctgtgggcaaagccctgtccgatgcctgcatgggaacaatcgccagcttcctgagcaagtaccaggacatcatcatcgagcaccagaaggtggtcaagggcaaccagaagagactggaaagcctgagggagctggccggcaaagagaacctggaataccccagcgtgaccctgcctcctcagcctcacacaaaagaaggcgtggacgcctacaacgaagtgatcgccagagtgagaatgtgggtcaacctgaacctgtggcagaagctgaaactgtccagggacgacgccaagcctctgctgagactgaagggcttccctagcttccctctggtggaaagacaggccaatgaagtggattggtgggacatggtctgcaacgtgaagaagctgatcaacgagaagaaagaggatggcaaggttttctggcagaacctggccggctacaagagacaagaagccctgaggccttacctgagcagcgaagaggaccggaagaagggcaagaagttcgccagataccagctgggcgacctgctgctgcacctggaaaagaagcacggcgaggactggggcaaagtgtacgatgaggcctgggagagaatcgacaagaaggtggaaggcctgagcaagcacattaagctggaagaggaaagaaggagcgaggacgcccaatctaaagccgctctgaccgattggctgagagccaaggccagctttgtgatcgagggcctgaaagaggccgacaaggacgagttctgcagatgcgagctgaagctgcagaagtggtacggcgatctgagaggcaagcccttcgccattgaggccgagaacagcatcctggacatcagcggcttcagcaagcagtacaactgcgccttcatttggcagaaagacggcgtcaagaaactgaacctgtacctgatcatcaattacttcaaaggcggcaagctgcggttcaagaagatcaaacccgaggccttcgaggctaacagattctacaccgtgatcaacaaaaagtccggcgagatcgtgcccatggaagtgaacttcaacttcgacgaccccaacctgattatcctgcctctggccttcggcaagagacagggcagagagttcatctggaacgatctgctgagcctggaaaccggctctctgaagctggccaatggcagagtgatcgagaaaaccctgtacaacaggagaaccagacaggacgagcctgctctgtttgtggccctgaccttcgagagaagagaggtgctggacagcagcaacatcaagcccatgaacctgatcggcgtggaccggggcgagaatatccctgctgtgatcgccctgacagaccctgaaggatgcccactgagcagattcaaggactccctgggcaaccctacacacatcctgagaatcggcgagagctacaaagagaagcagaggacaatccaggccaagaaagaggtggaacagagaagagccggcggatactctaggaagtacgccagcaaggccaagaatctggccgacgacatggtccgaaacaccgccagagatctgctgtactacgccgtgacacaggacgccatgctgatcttcgagaatctgagcagaggcttcggccggcagggcaagagaacctttatggccgagaggcagtacaccagaatggaagattggctcacagctaaactggcctacgagggactgagcaagacctacctgtccaaaacactggcccagtatacctccaagacctgcagcaattgcggcttcaccatcaccagcgccgactacgacagagtgctggaaaagctcaagaaaaccgccaccggctggatgaccaccatcaacggcaaagagctgaaggttgagggccagatcacctactacaacaggtacaagaggcagaacgtcgtgaaggatctgagcgtggaactggacagactgagcgaagagagcgtgaacaacgacatcagcagctggacaaagggcagatcaggcgaggctctgagcctgctgaagaagaggtttagccacagacctgtgcaagagaagttcgtgtgcctgaactgcggcttcgagacacacgccgatgaacaggctgccctgaacattgccagaagctggctgttcctgagaagccaagagtacaagaagtaccagaccaacaagaccaccggcaacaccgacaagagggcctttgtggaaacctggcagagcttctacagaaaaaagctgaaagaagtctggaagcccgccgtgactctcgaggggggtagcccaaaaaagaagagaaaggtatga

SEQ ID NO: 1115 - DNA, 116 bp, synthetic construct
  misc_feature 1..116: note = scaffold sequence
  source 1..116: mol_type = other DNA
actggcgcttttatctgattactttgagagccatcaccagcgactatgtcgtagtgggtaaagctcacatgaggatcacccatgtgagcatcaaagctgcattctagttgtggttt

SEQ ID NO: 1116 - DNA, 175 bp, synthetic construct
  misc_feature 1..175: note = scaffold sequence
  source 1..175: mol_type = other DNA
actggcgcttttatctgattactttgagagccatcaccagcgactatgtcgtagtgggtaaagctgcactatgggcgcagctcatgaggatcacccatgagctgacggtacaggccacatgaggatcacccatgtggtatagtgcagcatcaaagctgcattctagttgtggttt

SEQ ID NO: 1117 - DNA, 122 bp, synthetic construct
  misc_feature 1..122: note = scaffold sequence
  source 1..122: mol_type = other DNA
actggcgcttttatctgattactttgagagccatcaccagcgactatgtcgtagtgggtaaagctcacctgaggatcacccaggtgagcatcaaagctgcattctagttgtggttttttttt

SEQ ID NO: 1118 - DNA, 122 bp, synthetic construct
  misc_feature 1..122: note = scaffold sequence
  source 1..122: mol_type = other DNA
actggcgcttttatctgattactttgagagccatcaccagcgactatgtcgtagtgggtaaagctcgcatgaggatcacccatgcgagcatcaaagctgcattctagttgtggttttttttt

SEQ ID NO: 1119 - DNA, 122 bp, synthetic construct
  misc_feature 1..122: note = scaffold sequence
  source 1..122: mol_type = other DNA
actggcgcttttatctgattactttgagagccatcaccagcgactatgtcgtagtgggtaaagctcgcctgaggatcacccaggcgagcatcaaagctgcattctagttgtggttttttttt

SEQ ID NO: 1120 - DNA, 122 bp, synthetic construct
  misc_feature 1..122: note = scaffold sequence
  source 1..122: mol_type = other DNA
actggcgcttttatctgattactttgagagccatcaccagcgactatgtcgtagtgggtaaagctcgcctgagcatcagccaggcgagcatcaaagctgcattctagttgtggttttttttt

SEQ ID NO: 1121 - DNA, 122 bp, synthetic construct
  misc_feature 1..122: note = scaffold sequence
  source 1..122: mol_type = other DNA
actggcgcttttatctgattactttgagagccatcaccagcgactatgtcgtagtgggtaaagctcacatgagcatcagccatgtgagcatcaaagctgcattctagttgtggttttttttt

SEQ ID NO: 1122 - DNA, 122 bp, synthetic construct
  misc_feature 1..122: note = scaffold sequence
  source 1..122: mol_type = other DNA
actggcgcttttatctgattactttgagagccatcaccagcgactatgtcgtagtgggtaaagctcacatgagtatcaaccatgtgagcatcaaagctgcattctagttgtggttttttttt

SEQ ID NO: 1123 - DNA, 122 bp, synthetic construct
  misc_feature 1..122: note = scaffold sequence
  source 1..122: mol_type = other DNA
actggcgcttttatctgattactttgagagccatcaccagcgactatgtcgtagtgggtaaagctcacatgagaatcagccatgtgagcatcaaagctgcattctagttgtggttttttttt

SEQ ID NO: 1124 - DNA, 122 bp, synthetic construct
  misc_feature 1..122: note = scaffold sequence
  source 1..122: mol_type = other DNA
actggcgcttttatctgattactttgagagccatcaccagcgactatgtcgtagtgggtaaagctcccttgaggatcacccatgtgagcatcaaagctgcattctagttgtggttttttttt

SEQ ID NO: 1125 - DNA, 122 bp, synthetic construct
  misc_feature 1..122: note = scaffold sequence
  source 1..122: mol_type = other DNA
actggcgcttttatctgattactttgagagccatcaccagcgactatgtcgtagtgggtaaagctcacttgaggatcacccatgtgagcatcaaagctgcattctagttgtggttttttttt

SEQ ID NO: 1126 - DNA, 122 bp, synthetic construct
  misc_feature 1..122: note = scaffold sequence
  source 1..122: mol_type = other DNA
actggcgcttttatctgattactttgagagccatcaccagcgactatgtcgtagtgggtaaagctcacctgaggatcacccatgtgagcatcaaagctgcattctagttgtggttttttttt

SEQ ID NO: 1127 - DNA, 122 bp, synthetic construct
  misc_feature 1..122: note = scaffold sequence
  source 1..122: mol_type = other DNA
actggcgcttttatctgattactttgagagccatcaccagcgactatgtcgtagtgggtaaagctcacatgaggatcacctatgtgagcatcaaagctgcattctagttgtggttttttttt

SEQ ID NO: 1128 - DNA, 122 bp, synthetic construct
  misc_feature 1..122: note = scaffold sequence
  source 1..122: mol_type = other DNA
actggcgcttttatctgattactttgagagccatcaccagcgactatgtcgtagtgggtaaagctcacattaggatcaccaatgtgagcatcaaagctgcattctagttgtggttttttttt

SEQ ID NO: 1129 - DNA, 122 bp, synthetic construct
  misc_feature 1..122: note = scaffold sequence
  source 1..122: mol_type = other DNA
actggcgcttttatctgattactttgagagccatcaccagcgactatgtcgtagtgggtaaagctcacattaggatcaccgatgtgagcatcaaagctgcattctagttgtggttttttttt

SEQ ID NO: 1130 - DNA, 122 bp, synthetic construct
  misc_feature 1..122: note = scaffold sequence
  source 1..122: mol_type = other DNA
actggcgcttttatctgattactttgagagccatcaccagcgactatgtcgtagtgggtaaagctcacattaggatcacctatgtgagcatcaaagctgcattctagttgtggttttttttt

SEQ ID NO: 1131 - DNA, 122 bp, synthetic construct
  misc_feature 1..122: note = scaffold sequence
  source 1..122: mol_type = other DNA
actggcgcttttatctgattactttgagagccatcaccagcgactatgtcgtagtgggtaaagctcacatgaggattacccatgtgagcatcaaagctgcattctagttgtggttttttttt

SEQ ID NO: 1132 - DNA, 122 bp, synthetic construct
  misc_feature 1..122: note = scaffold sequence
  source 1..122: mol_type = other DNA
actggcgcttttatctgattactttgagagccatcaccagcgactatgtcgtagtgggtaaagctcacatgaggataacccatgtgagcatcaaagctgcattctagttgtggttttttttt

SEQ ID NO: 1133 - DNA, 122 bp, synthetic construct
  misc_feature 1..122: note = scaffold sequence
  source 1..122: mol_type = other DNA
actggcgcttttatctgattactttgagagccatcaccagcgactatgtcgtagtgggtaaagctcacatgaggatgacccatgtgagcatcaaagctgcattctagttgtggttttttttt

SEQ ID NO: 1134 - DNA, 122 bp, synthetic construct
  misc_feature 1..122: note = scaffold sequence
  source 1..122: mol_type = other DNA
actggcgcttttatctgattactttgagagccatcaccagcgactatgtcgtagtgggtaaagctcacatgaggaccacccatgtgagcatcaaagctgcattctagttgtggttttttttt

SEQ ID NO: 1135 - DNA, 122 bp, synthetic construct
  misc_feature 1..122: note = scaffold sequence
  source 1..122: mol_type = other DNA
actggcgcttttatctgattactttgagagccatcaccagcgactatgtcgtagtgggtaaagctcagatgaggatcacccatgggagcatcaaagctgcattctagttgtggttttttttt

SEQ ID NO: 1136 - DNA, 122 bp, synthetic construct
  misc_feature 1..122: note = scaffold sequence
  source 1..122: mol_type = other DNA
actggcgcttttatctgattactttgagagccatcaccagcgactatgtcgtagtgggtaaagctcacatggggatcacccatgtgagcatcaaagctgcattctagttgtggttttttttt

SEQ ID NO: 1137 - RNA, 19 nt, synthetic construct
  misc_feature 1..19: note = MS2 hairpin sequence
  source 1..19: mol_type = other RNA
acatgaggatcacccatgt

SEQ ID NO: 1138 - RNA, 19 nt, synthetic construct
  misc_feature 1..19: note = MS2 hairpin sequence
  source 1..19: mol_type = other RNA
acctgaggatcacccaggt

SEQ ID NO: 1139 - RNA, 19 nt, synthetic construct
  misc_feature 1..19: note = MS2 hairpin sequence
  source 1..19: mol_type = other RNA
gcatgaggatcacccatgc

SEQ ID NO: 1140 - RNA, 19 nt, synthetic construct
  misc_feature 1..19: note = MS2 hairpin sequence
  source 1..19: mol_type = other RNA
gcctgaggatcacccaggc

SEQ ID NO: 1141 - RNA, 19 nt, synthetic construct
  misc_feature 1..19: note = MS2 hairpin sequence
  source 1..19: mol_type = other RNA
gcctgagcatcagccaggc

SEQ ID NO: 1142 - RNA, 19 nt, synthetic construct
  misc_feature 1..19: note = MS2 hairpin sequence
  source 1..19: mol_type = other RNA
acatgagcatcagccatgt

SEQ ID NO: 1143 - RNA, 19 nt, synthetic construct
  misc_feature 1..19: note = MS2 hairpin sequence
  source 1..19: mol_type = other RNA
acttgaggatcacccatgt

SEQ ID NO: 1144 - RNA, 19 nt, synthetic construct
  misc_feature 1..19: note = MS2 hairpin sequence
  source 1..19: mol_type = other RNA
acattaggatcaccaatgt

SEQ ID NO: 1145 - RNA, 19 nt, synthetic construct
  misc_feature 1..19: note = MS2 hairpin sequence
  source 1..19: mol_type = other RNA
acatgaggaccacccatgt

SEQ ID NO: 1146 - RNA, 20 nt, synthetic construct
  misc_feature 1..20: note = spacer sequence
  source 1..20: mol_type = other RNA
ctgcattctagttgtggttt

SEQ ID NO: 1147 - protein, 979 aa, synthetic construct
  REGION 1..979: note = CasX variant
QEIKRINKIRRRLVKDSNTKKAGKTGPMKTLLVRVMTPDLRERLENLRKKPENIPQPISNTSRANLNKLLTDYTEMKKAILHVYWEEFQKDPVGLMSRVAQPASKKIDQNKLKPEMDEKGNLTTAGFACSQCGQPLFVYKLEQVSEKGKAYTNYFGRCNVAEHEKLILLAQLKPEKDSDEAVTYSLGKFGQRALDFYSIHVTKESTHPVKPLAQIAGNRYASGPVGKALSDACMGTIASFLSKYQDIIIEHQKVVKGNQKRLESLRELAGKENLEYPSVTLPPQPHTKEGVDAYNEVIARVRMWVNLNLWQKLKLSRDDAKPLLRLKGFPSFPLVERQANEVDWWDMVCNVKKLINEKKEDGKVFWQNLAGYKRQEALRPYLSSEEDRKKGKKFARYQLGDLLLHLEKKHGEDWGKVYDEAWERIDKKVEGLSKHIKLEEERRSEDAQSKAALTDWLRAKASFVIEGLKEADKDEFCRCELKLQKWYGDLRGKPFAIEAENSILDISGFSKQYNCAFIWQKDGVKKLNLYLIINYFKGGKLRFKKIKPEAFEANRFYTVINKKSGEIVPMEVNFNFDDPNLIILPLAFGKRQGREFIWNDLLSLETGSLKLANGRVIEKTLYNARRTRQDEPALFVALTFERREVLDSSNIKPMNLIGVDRGENIPAVIALTDPEGCPLSRFKDSLGNPTHILRIGESYKEKQRTIQAKKEVEQRRAGGYSRKYASKAKNLADDMVRNTARDLLYYAVTQDAMLIFENLSRGFGRQGKRTFMAERQYTRMEDWLTAKLAYEGLPSKTYLSKTLAQYTSKTCSNCGFTITSADYDRVLEKLKKTATGWMTTINGKELKVEGQITYYNRYKRQNVVKDLSVELDRLSEESVNNDISSWTKGRSGEALSLLKKRFSHRPVQEKFVCLNCGFETHADEQAALNIARSWLFLRSQEYKKYQTNKTTGNTDKRAFVETWQSFYRKKLKEVWKPAV

SEQ ID NO: 1148 - protein, 978 aa, synthetic construct
  REGION 1..978: note = CasX variant
QEIKRINKIRRRLVKDSNTKKAGKTGPMKTLLVRVMTPDLRERLENLRKKPENIPQPISNTSRANLNKLLTDYTEMKKAILHVYWEEFQVDPVGLMSRVAQPASKKIDQNKLKPEMDEKGNLTTAGFACSQCGQPLFVYKLEQVSEKGKAYTNYFGRCNVAEHEKLILLAQLKPEKDSDEAVTYSLGKFGQRALDFYSIHVTKESTHPVKPLAQIAGNRYASGPVGKALSDACMGTIASFLSKYQDIIIEHQKVVKGNQKRLESLRELAGKENLEYPSVTLPPQPHTKEGVDAYNEVIARVRMWVNLNLWQKLKLSRDDAKPLLRLKGFPSFPLVERQANEVDWWDMVCNVKKLINEKKEDGKVFWQNLAGYKRQEALRPYLSSEEDRKKGKKFARYQLGDLLLHLEKKHGEDWGKVYDEAWERIDKKVEGLSKHIKLEEERRSEDAQSKAALTDWLRAKASFVIEGLKEADKDEFCRCELKLQKWYGDLRGKPFAIEAENSILDISGFSKQYNCAFIWQKDGVKKLNLYLIINYFKGGKLRFKKIKPEAFEANRFYTVINKKSGEIVPMEVNFNFDDPNLIILPLAFGKRQGREFIWNDLLSLETGSLKLANGRVIEKTLYNRRTRQDEPALFVALTFERREVLDSSNIKPMNLIGVDRGENIPAVIALTDPEGCPLSRFKDSLGNPTHILRIGESYKEKQRTIQAKKEVEQRRAGGYSRKYASKAKNLADDMVRNTARDLLYYAVTQDAMLIFENLSRGFGRQGKRTFMAERQYTRMEDWLTAKLAYEGLPSKTYLSKTLAQYTSKTCSNCGFTITSADYDRVLEKLKKTATGWMTTINGKELKVEGQITYYNRYKRQNVVKDLSVELDRLSEESVNNDISSWTKGRSGEALSLLKKRFSHRPVQEKFVCLNCGFETHADEQAALNIARSWLFLRSQEYKKYQTNKTTGNTDKRAFVETWQSFYRKKLKEVWKPAV

SEQ ID NO: 1149 - protein, 979 aa, synthetic construct
  REGION 1..979: note = CasX variant
QEIKRINKIRRRLVKDSNTKKAGKTGPMKTLLVRVMTPDLRERLENLRKKPENIPQPISNTSRANLNKLLTDYTEMKKAILHVYWEGEFQKDPVGLMSRVAQPASKKIDQNKLKPEMDEKGNLTTAGFACSQCGQPLFVYKLEQVSEKGKAYTNYFGRCNVAEHEKLILLAQLKPEKDSDEAVTYSLGKFGQRALDFYSIHVTKESTHPVKPLAQIAGNRYASGPVGKALSDACMGTIASFLSKYQDIIIEHQKVVKGNQKRLESLRELAGKENLEYPSVTLPPQPHTKEGVDAYNEVIARVRMWVNLNLWQKLKLSRDDAKPLLRLKGFPSFPLVERQANEVDWWDMVCNVKKLINEKKEDGKVFWQNLAGYKRQEALRPYLSSEEDRKKGKKFARYQLGDLLLHLEKKHGEDWGKVYDEAWERIDKKVEGLSKHIKLEEERRSEDAQSKAALTDWLRAKASFVIEGLKEADKDEFCRCELKLQKWYGDLRGKPFAIEAENSILDISGFSKQYNCAFIWQKDGVKKLNLYLIINYFKGGKLRFKKIKPEAFEANRFYTVINKKSGEIVPMEVNFNFDDPNLIILPLAFGKRQGREFIWNDLLSLETGSLKLANGRVIEKTLYNRRTRQDEPALFVALTFERREVLDSSNIKPMNLIGVDRGENIPAVIALTDPEGCPLSRFKDSLGNPTHILRIGESYKEKQRTIQAKKEVEQRRAGGYSRKYASKAKNLADDMVRNTARDLLYYAVTQDAMLIFENLSRGFGRQGKRTFMAERQYTRMEDWLTAKLAYEGLPSKTYLSKTLAQYTSKTCSNCGFTITSADYDRVLEKLKKTATGWMTTINGKELKVEGQITYYNRYKRQNVVKDLSVELDRLSEESVNNDISSWTKGRSGEALSLLKKRFSHRPVQEKFVCLNCGFETHADEQAALNIARSWLFLRSQEYKKYQTNKTTGNTDKRAFVETWQSFYRKKLKEVWKPAV

SEQ ID NO: 1150 - protein, 978 aa, synthetic construct
  REGION 1..978: note = CasX variant
QEIKRINKIRRRLVKDSNTKKAGKTGPMKTLLVRVMTPDLRERLENLRKKPENIPQPISNTSRANLNKLLTDYTEMKKAILHVYWEEFQKDPVGLMSRVAQPASKKIDQNKLKPEMDEKGNLTTAGFACSQCGQPLFVYKLEQVSEKGKAYTNYFGRCNVAEHEKLILLAQLKPEKDSDEAVTYSLGKFGQRALDFYSIHVTKESTHPVKPLAQIAGNRYASGPVGKALSDACMGTIASFLSKYQDIIIEHQKVVKGNQKRLEHLRELAGKENLEYPSVTLPPQPHTKEGVDAYNEVIARVRMWVNLNLWQKLKLSRDDAKPLLRLKGFPSFPLVERQANEVDWWDMVCNVKKLINEKKEDGKVFWQNLAGYKRQEALRPYLSSEEDRKKGKKFARYQLGDLLLHLEKKHGEDWGKVYDEAWERIDKKVEGLSKHIKLEEERRSEDAQSKAALTDWLRAKASFVIEGLKEADKDEFCRCELKLQKWYGDLRGKPFAIEAENSILDISGFSKQYNCAFIWQKDGVKKLNLYLIINYFKGGKLRFKKIKPEAFEANRFYTVINKKSGEIVPMEVNFNFDDPNLIILPLAFGKRQGREFIWNDLLSLETGSLKLANGRVIEKTLYNRRTRQDEPALFVALTFERREVLDSSNIKPMNLIGVDRGENIPAVIALTDPEGCPLSRFKDSLGNPTHILRIGESYKEKQRTIQAKKEVEQRRAGGYSRKYASKAKNLADDMVRNTARDLLYYAVTQDAMLIFENLSRGFGRQGKRTFMAERQYTRMEDWLTAKLAYEGLPSKTYLSKTLAQYTSKTCSNCGFTITSADYDRVLEKLKKTATGWMTTINGKELKVEGQITYYNRYKRQNVVKDLSVELDRLSEESVNNDISSWTKGRSGEALSLLKKRFSHRPVQEKFVCLNCGFETHADEQAALNIARSWLFLRSQEYKKYQTNKTTGNTDKRAFVETWQSFYRKKLKEVWKPAV

SEQ ID NO: 1151 - protein, 979 aa, synthetic construct
  REGION 1..979: note = CasX variant
QEIKRINKIRRRLVKDSNTKKAGKTGPMKTLLVRVMTPDLRERLENLRKKPENIPQPISNTSRANLNKLLTDYTEMKKAILHVYWEEFQKDPVGLMSRVAQPASKKIDQNKLKPEMDEKGNLTTAGFACSQCGQPLFVYKLEQVSEKGKAYTNYFGRCNVAEHEKLILLAQLKPEKDSDEAVTYSLGKFGQRALDFYSIHVTKESTHPVKPLAQICAGNRYASGPVGKALSDACMGTIASFLSKYQDIIIEHQKVVKGNQKRLESLRELAGKENLEYPSVTLPPQPHTKEGVDAYNEVIARVRMWVNLNLWQKLKLSRDDAKPLLRLKGFPSFPLVERQANEVDWWDMVCNVKKLINEKKEDGKVFWQNLAGYKRQEALRPYLSSEEDRKKGKKFARYQLGDLLLHLEKKHGEDWGKVYDEAWERIDKKVEGLSKHIKLEEERRSEDAQSKAALTDWLRAKASFVIEGLKEADKDEFCRCELKLQKWYGDLRGKPFAIEAENSILDISGFSKQYNCAFIWQKDGVKKLNLYLIINYFKGGKLRFKKIKPEAFEANRFYTVINKKSGEIVPMEVNFNFDDPNLIILPLAFGKRQGREFIWNDLLSLETGSLKLANGRVIEKTLYNRRTRQDEPALFVALTFERREVLDSSNIKPMNLIGVDRGENIPAVIALTDPEGCPLSRFKDSLGNPTHILRIGESYKEKQRTIQAKKEVEQRRAGGYSRKYASKAKNLADDMVRNTARDLLYYAVTQDAMLIFENLSRGFGRQGKRTFMAERQYTRMEDWLTAKLAYEGLPSKTYLSKTLAQYTSKTCSNCGFTITSADYDRVLEKLKKTATGWMTTINGKELKVEGQITYYNRYKRQNVVKDLSVELDRLSEESVNNDISSWTKGRSGEALSLLKKRFSHRPVQEKFVCLNCGFETHADEQAALNIARSWLFLRSQEYKKYQTNKTTGNTDKRAFVETWQSFYRKKLKEVWKPAV

SEQ ID NO: 1152 - protein, 976 aa, synthetic construct
  REGION 1..976: note = CasX variant
QEIKRINKIRRRLVKDSNTKKAGKTGPMKTLLVRVMTPDLRERLENLRKKPENIPQPISNTSRANLNKLLTDYTEMKKAILHVYWEEFQKDPVGLMSRVAQPASKKIDQNKLKPEMDEKGNLTTAGFACSQCGQPLFVYKLEQVSEKGKAYTNYFGRCNVAEHEKLILLAQLKPEKDSDEAVTYSLGKFGQRALDFYSIHVTKESTHPVKPLAQIAGNRYASGPVGKALSDACMGTIASFLSKYQDIIIEHQKVVKGNQKRLESLRELAGKENLEYPSVTLPPQPHTKEGVDAYNEVIARVRMWVNLNLWQKLKLSRDDAKPLLRLKGFPSFPLVERQANEVDWWVCNVKKLINEKKEDGKVFWQNLAGYKRQEALRPYLSSEEDRKKGKKFARYQLGDLLLHLEKKHGEDWGKVYDEAWERIDKKVEGLSKHIKLEEERRSEDAQSKAALTDWLRAKASFVIEGLKEADKDEFCRCELKLQKWYGDLRGKPFAIEAENSILDISGFSKQYNCAFIWQKDGVKKLNLYLIINYFKGGKLRFKKIKPEAFEANRFYTVINKKSGEIVPMEVNFNFDDPNLIILPLAFGKRQGREFIWNDLLSLETGSLKLANGRVIEKTLYNRRTRQDEPALFVALTFERREVLDSSNIKPMNLIGVDRGENIPAVIALTDPEGCPLSRFKDSLGNPTHILRIGESYKEKQRTIQAKKEVEQRRAGGYSRKYASKAKNLADDMVRNTARDLLYYAVTQDAMLIFENLSRGFGRQGKRTFMAERQYTRMEDWLTAKLAYEGLPSKTYLSKTLAQYTSKTCSNCGFTITSADYDRVLEKLKKTATGWMTTINGKELKVEGQITYYNRYKRQNVVKDLSVELDRLSEESVNNDISSWTKGRSGEALSLLKKRFSHRPVQEKFVCLNCGFETHADEQAALNIARSWLFLRSQEYKKYQTNKTTGNTDKRAFVETWQSFYRKKLKEVWKPAV

SEQ ID NO: 1153 - protein, 978 aa, synthetic construct
  REGION 1..978: note = CasX variant
QEIKRINKIRRRLVKDSNTKKAGKTGPMKTLLVRVMTPDLRERLENLRKKPENIPQPISNTSRANLNKLLTDYTEMKKAILHVYWEEFQKDPVGLMSRVAQPASKKIDQNKLKPEMDEKGNLTTAGFACSQCGQPLFVYKLEQVSEKGKAYTNYFGRCNVAEHEKLILLAQLKPEKDSDEAVTYSLGKFGQRALDFYSIHVTKESTHPVKPLAQIAGNRYASGPVGKALSDACMGTIASFLSKYQDIIIEHQKVVKGNQKRLESLRELAGKENLEYPSVTLPPQPHTKEGVDAYNEVIARVRMWVNLNLWQKLKLSRDDAKPLLRLKGFPSFPLVERQANEVDWWDMVCNVKKLINEKKEDGKVFWQNLAGYKRQEALRPYLSSEEDRKKGKKFARYQLGDLLLHLEKKHGEDWGKVYDEAWERIDKKVEGLSKHIKLEEERRSEDAQSKAALTDWLRAKASFVIEGLKEADKDEFCRCELKLQKWYGDLRGKPFAIEAENSILDISGFSKQYNCAFIWQKDGVKKLNLYLIINYFGGGKLRFKKIKPEAFEANRFYTVINKKSGEIVPMEVNFNFDDPNLIILPLAFGKRQGREFIWNDLLSLETGSLKLANGRVIEKTLYNRRTRQDEPALFVALTFERREVLDSSNIKPMNLIGVDRGENIPAVIALTDPEGCPLSRFKDSLGNPTHILRIGESYKEKQRTIQAKKEVEQRRAGGYSRKYASKAKNLADDMVRNTARDLLYYAVTQDAMLIFENLSRGFGRQGKRTFMAERQYTRMEDWLTAKLAYEGLPSKTYLSKTLAQYTSKTCSNCGFTITSADYDRVLEKLKKTATGWMTTINGKELKVEGQITYYNRYKRQNVVKDLSVELDRLSEESVNNDISSWTKGRSGEALSLLKKRFSHRPVQEKFVCLNCGFETHADEQAALNIARSWLFLRSQEYKKYQTNKTTGNTDKRAFVETWQSFYRKKLKEVWKPAV

SEQ ID NO: 1154 - protein, 979 aa, synthetic construct
  REGION 1..979: note = CasX variant
QEIKRINKIRRRLVKDSNTKKAGKTGPMKTLLVRVMTPDLRERLENLRKKPENIPQPISNTSRANLNKLLTDYTEMKKAILHVYWEEFQKDPVGLMSRVAQPASKKIDQNKLKPEMDEKGNLTTAGFACSQCGQPLFVYKLEQVSEKGKAYTNYFGRCNVAEHEKLILLAQLKPEKDSDEAVTYSLGKFGQRALDFYSIHVTKESTHPVKPLAQIAGNRYASGPVGKALSDACMGTIASFLSKYQDIIIEHQKVVKGNQKRLESLRELAGKENLEYPSVTLPPQPHTKEGVDAYNEVIARVRMWVNLNLWQKLKLSRDDAKPLLRLKGFPSFPLVERQANEVDWWDMVCNVKKLINEKKEDGKVFWQNLAGYKRQEALRPYLSSEEDRKKGKKFARYQLGDLLLHLEKKHGEDWGKLVYDEAWERIDKKVEGLSKHIKLEEERRSEDAQSKAALTDWLRAKASFVIEGLKEADKDEFCRCELKLQKWYGDLRGKPFAIEAENSILDISGFSKQYNCAFIWQKDGVKKLNLYLIINYFKGGKLRFKKIKPEAFEANRFYTVINKKSGEIVPMEVNFNFDDPNLIILPLAFGKRQGREFIWNDLLSLETGSLKLANGRVIEKTLYNRRTRQDEPALFVALTFERREVLDSSNIKPMNLIGVDRGENIPAVIALTDPEGCPLSRFKDSLGNPTHILRIGESYKEKQRTIQAKKEVEQRRAGGYSRKYASKAKNLADDMVRNTARDLLYYAVTQDAMLIFENLSRGFGRQGKRTFMAERQYTRMEDWLTAKLAYEGLPSKTYLSKTLAQYTSKTCSNCGFTITSADYDRVLEKLKKTATGWMTTINGKELKVEGQITYYNRYKRQNVVKDLSVELDRLSEESVNNDISSWTKGRSGEALSLLKKRFSHRPVQEKFVCLNCGFETHADEQAALNIARSWLFLRSQEYKKYQTNKTTGNTDKRAFVETWQSFYRKKLKEVWKPAV

SEQ ID NO: 1155 - protein, 979 aa, synthetic construct
  REGION 1..979: note = CasX variant
QEIKRINKIRRRLVKDSNTKKAGKTGPMKTLLVRVMTPDLRERLENLRKKPENIPQPISNTSRANLNKLLTDYTEMKKAILHVYWEEFQKDPVGLMSRVAQPASKKIDQNKLKPEMDEKGNLTTAGFACSQCGQPLFVYKLEQVSEKGKAYTNYFGRCNVAEHEKLILLAQLKPEKDSDEAVTYSLGKFGQRALDFYSIHVTKESTHPVKPLAQIAGNRYASGPVGKALSDACMGTIASFLSKYQDIIIEHQKVVKGNQKRLESLRELAGKENLEYPSVTLPPQPHTKEGVDAYNEVIARVRMWVNLNLWQKLKLSRDDAKPLLRLKGQFPSFPLVERQANEVDWWDMVCNVKKLINEKKEDGKVFWQNLAGYKRQEALRPYLSSEEDRKKGKKFARYQLGDLLLHLEKKHGEDWGKVYDEAWERIDKKVEGLSKHIKLEEERRSEDAQSKAALTDWLRAKASFVIEGLKEADKDEFCRCELKLQKWYGDLRGKPFAIEAENSILDISGFSKQYNCAFIWQKDGVKKLNLYLIINYFKGGKLRFKKIKPEAFEANRFYTVINKKSGEIVPMEVNFNFDDPNLIILPLAFGKRQGREFIWNDLLSLETGSLKLANGRVIEKTLYNRRTRQDEPALFVALTFERREVLDSSNIKPMNLIGVDRGENIPAVIALTDPEGCPLSRFKDSLGNPTHILRIGESYKEKQRTIQAKKEVEQRRAGGYSRKYASKAKNLADDMVRNTARDLLYYAVTQDAMLIFENLSRGFGRQGKRTFMAERQYTRMEDWLTAKLAYEGLPSKTYLSKTLAQYTSKTCSNCGFTITSADYDRVLEKLKKTATGWMTTINGKELKVEGQITYYNRYKRQNVVKDLSVELDRLSEESVNNDISSWTKGRSGEALSLLKKRFSHRPVQEKFVCLNCGFETHADEQAALNIARSWLFLRSQEYKKYQTNKTTGNTDKRAFVETWQSFYRKKLKEVWKPAV

SEQ ID NO: 1156 - protein, 978 aa, synthetic construct
  REGION 1..978: note = CasX variant
QEIKRINKIRRRLVKDSNTKKAGKTGPMKTLLVRVMTPDLRERLENLRKKPENIPQPISNTSRANLNKLLTDYTEMKKAILHVYWEEFQKDPVGLMSRVAQPASKKIDQNKLKPEMDEKGNLTTAGFACSQCGQPLFVYKLEQVSEKGKAYTNYFGRCNVAEHEKLILLAQLKPEKDSDEAVTYSLGKFGQRALDFYSIHVTKESTHPVKPLAQIAGNRYASGPVGKALSDACMGTIASFLSKYQDIIIEHQKVVKGNQKRLESLRELAGKENLEYPSVTLPPQPHTKEGVDAYNEVIARVRMWVNLNLWQKLKLSRDDAKPLLRLKGFPSFPLVERQANEVSWWDMVCNVKKLINEKKEDGKVFWQNLAGYKRQEALRPYLSSEEDRKKGKKFARYQLGDLLLHLEKKHGEDWGKVYDEAWERIDKKVEGLSKHIKLEEERRSEDAQSKAALTDWLRAKASFVIEGLKEADKDEFCRCELKLQKWYGDLRGKPFAIEAENSILDISGFSKQYNCAFIWQKDGVKKLNLYLIINYFKGGKLRFKKIKPEAFEANRFYTVINKKSGEIVPMEVNFNFDDPNLIILPLAFGKRQGREFIWNDLLSLETGSLKLANGRVIEKTLYNRRTRQDEPALFVALTFERREVLDSSNIKPMNLIGVDRGENIPAVIALTDPEGCPLSRFKDSLGNPTHILRIGESYKEKQRTIQAKKEVEQRRAGGYSRKYASKAKNLADDMVRNTARDLLYYAVTQDAMLIFENLSRGFGRQGKRTFMAERQYTRMEDWLTAKLAYEGLPSKTYLSKTLAQYTSKTCSNCGFTITSADYDRVLEKLKKTATGWMTTINGKELKVEGQITYYNRYKRQNVVKDLSVELDRLSEESVNNDISSWTKGRSGEALSLLKKRFSHRPVQEKFVCLNCGFETHADEQAALNIARSWLFLRSQEYKKYQTNKTTGNTDKRAFVETWQSFYRKKLKEVWKPAV

SEQ ID NO: 1157 - protein, 978 aa, synthetic construct
  REGION 1..978: note = CasX variant
QEIKRINKIRRRLVKDSNTKKAGKTGPMKTLLVRVMTPDLRERLENLRKKPENIPQPISNTSRANLNKLLTDYTEMKKAILHVYWEEFQKDPVGLMSRVAQPASKKIDQNKLKPEMDEKGNLTTAGFACSQCGQPLFVYKLEQVSEKGKAYTNYFGRCNVAEHEKLILLAQLKPEKDSDEAVTYSLGKFGQRALDFYSIHVTKESTHPVKPLAQIAGNRYASGPVGKALSDACMGTIASFLSKYQDIIIEHQKVVKGNQKRLESLRELAGKENLEYPSVTLPPQPHTKEGVDAYNEVIARVRMWVNLNLWQKLKLSRDDAKPLLRLKGFPSFPLVERQANEVDWWDMVCNVKKLINEKKEDGKVFWQNLAGYKRQEALRPYLSSEEDRKKGKKFARYQLGDLLLHLEKKHGEDWGKVYDEAWERIDKKVEGLSKHIKLEEERRSEDAQSKAALTDWLREKASFVIEGLKEADKDEFCRCELKLQKWYGDLRGKPFAIEAENSILDISGFSKQYNCAFIWQKDGVKKLNLYLIINYFKGGKLRFKKIKPEAFEANRFYTVINKKSGEIVPMEVNFNFDDPNLIILPLAFGKRQGREFIWNDLLSLETGSLKLANGRVIEKTLYNRRTRQDEPALFVALTFERREVLDSSNIKPMNLIGVDRGENIPAVIALTDPEGCPLSRFKDSLGNPTHILRIGESYKEKQRTIQAKKEVEQRRAGGYSRKYASKAKNLADDMVRNTARDLLYYAVTQDAMLIFENLSRGFGRQGKRTFMAERQYTRMEDWLTAKLAYEGLPSKTYLSKTLAQYTSKTCSNCGFTITSADYDRVLEKLKKTATGWMTTINGKELKVEGQITYYNRYKRQNVVKDLSVELDRLSEESVNNDISSWTKGRSGEALSLLKKRFSHRPVQEKFVCLNCGFETHADEQAALNIARSWLFLRSQEYKKYQTNKTTGNTDKRAFVETWQSFYRKKLKEVWKPAV

SEQ ID NO: 1158 - protein, 978 aa, synthetic construct
  REGION 1..978: note = CasX variant
QEIKRINKIRRRLVKDSNTKKAGKTGPMKTLLVRVMTPDLRERLENLRKKPENIPQPISNTSRANLNKLLTDYTEMKKAILHVYWEEFQKDPVGLMSRVAQPASKKIDQNKLKPEMDEKGNLTTAGFACSQCGQPLFVYKLEQVSEKGKAYTNYFGRCNVAEHEKLILLAQLKPEKDSDEAVTYSLGKFGQRALDFYSIHVTKESTHPVKPLAQIAGNRYASGPVGKALSDACMGTIASFLSKYQDIIIEHQKVVKGNQKRLESLRELAGKENLEYPSVTLPPQPHTKEGVDAYNEVIARVRMWVNLNLWQKLKLSRDDAKPLLRLKGFPSFPLVERQANEVDWWDMVCNVKKLINEKKEDGKVFWQNLAGYKRQEALRPYLSSEEDRKKGKKFARYQLGDLLLHLEKKHGEDWGKVYDEAWERIDKKVEGLSKHIKLEEERRSEDAQSKAALTDWLRAKASFVIEGLKEADKDEFCRCELKLQKWYGDLRGKPFAIEAENSILDISGFSKQYNCAFIWQKDGVKKLNLYLIINYFKGGKLRFKKIKPEAFEANRFYTVINKKSGEIVPMEVNFNFDDPNLIILPLAFGKRQGREFIWNDLLSLETGSLKLANGRVIEKTTYNRRTRQDEPALFVALTFERREVLDSSNIKPMNLIGVDRGENIPAVIALTDPEGCPLSRFKDSLGNPTHILRIGESYKEKQRTIQAKKEVEQRRAGGYSRKYASKAKNLADDMVRNTARDLLYYAVTQDAMLIFENLSRGFGRQGKRTFMAERQYTRMEDWLTAKLAYEGLPSKTYLSKTLAQYTSKTCSNCGFTITSADYDRVLEKLKKTATGWMTTINGKELKVEGQITYYNRYKRQNVVKDLSVELDRLSEESVNNDISSWTKGRSGEALSLLKKRFSHRPVQEKFVCLNCGFETHADEQAALNIARSWLFLRSQEYKKYQTNKTTGNTDKRAFVETWQSFYRKKLKEVWKPAV

SEQ ID NO: 1159 - protein, 978 aa, synthetic construct
  REGION 1..978: note = CasX variant
QEIKRINKIRRRLVKDSNTKKAGKTGPMKTLLVRVMTPDLRERLENLRKKPENIPQPISNTSRANLNKLLTDYTEMKKAILHVYWEEFQKDPVGLMSRVAQPASKKIDQNKLKPEMDEKGNLTTAGFACSQCGQPLFVYKLEQVSEKGKAYTNYFGRCNVAEHEKLILLAQLKPEKDSDEAVTYSLGKFGQRALDFYSIHVTKESTHPVKPLAQIAGNRYASGPVGKALSDACMGTIASFLSKYQDIIIEHQKVVKGNQKRLESLRELAGKENLEYPSVTLPPQPHTKEGVDAYNEVIARVRMWVNLNLWQKLKLSRDDAKPLLRLKGFPSFPLVERQANEVDWWDMVCNVKKLINEKKEDGKVFWQNLAGYKRQEANRPYLSSEEDRKKGKKFARYQLGDLLLHLEKKHGEDWGKVYDEAWERIDKKVEGLSKHIKLEEERRSEDAQSKAALTDWLRAKASFVIEGLKEADKDEFCRCELKLQKWYGDLRGKPFAIEAENSILDISGFSKQYNCAFIWQKDGVKKLNLYLIINYFKGGKLRFKKIKPEAFEANRFYTVINKKSGEIVPMEVNFNFDDPNLIILPLAFGKRQGREFIWNDLLSLETGSLKLANGRVIEKTLYNRRTRQDEPALFVALTFERREVLDSSNIKPMNLIGVDRGENIPAVIALTDPEGCPLSRFKDSLGNPTHILRIGESYKEKQRTIQAKKEVEQRRAGGYSRKYASKAKNLADDMVRNTARDLLYYAVTQDAMLIFENLSRGFGRQGKRTFMAERQYTRMEDWLTAKLAYEGLPSKTYLSKTLAQYTSKTCSNCGFTITSADYDRVLEKLKKTATGWMTTINGKELKVEGQITYYNRYKRQNVVKDLSVELDRLSEESVNNDISSWTKGRSGEALSLLKKRFSHRPVQEKFVCLNCGFETHADEQAALNIARSWLFLRSQEYKKYQTNKTTGNTDKRAFVETWQSFYRKKLKEVWKPAV

SEQ ID NO: 1160 - protein, 978 aa, synthetic construct
  REGION 1..978: note = CasX variant
QEIKRINKIRRRLVKDSNTKKAGKTGPMKTLLVRVMTPDLRERLENLRKKPENIPQPISNTSRANLNKLLTDYTEMKKAILHVYWEEFQKDPVGLMSRVAQPASKKIDQNKLKPEMDEKGNLTTAGFACSQCGQPLFVYKLEQVSEKGKAYTNYFGRCNVAEHEKLILLAQLKPEKDSDEAVTYSLGKFGQRALDFYSIHVTKESTHPVKPLAQIAGNRYASGPVGKALSDACMGTIASFLSKYQDIIIEHQKVVKGNQKRLESLRELAGKENLEYPSVTLPPQPHTKEGVDAYNEVIARVRMWVNLNLWQKLKLSRDDAKPLLRLKGFPSFPLVERQANEVDWWDMVCNVKKLINEKKEDGKVFWQNLAGYKRQEALRPYLSSEEDRKKGKKFARYQLGDLLLHLEKKHGEDWGKVYDEAWERIDKKVEGLSKHIKLEELRRSEDAQSKAALTDWLRAKASFVIEGLKEADKDEFCRCELKLQKWYGDLRGKPFAIEAENSILDISGFSKQYNCAFIWQKDGVKKLNLYLIINYFKGGKLRFKKIKPEAFEANRFYTVINKKSGEIVPMEVNFNFDDPNLIILPLAFGKRQGREFIWNDLLSLETGSLKLANGRVIEKTLYNRRTRQDEPALFVALTFERREVLDSSNIKPMNLIGVDRGENIPAVIALTDPEGCPLSRFKDSLGNPTHILRIGESYKEKQRTIQAKKEVEQRRAGGYSRKYASKAKNLADDMVRNTARDLLYYAVTQDAMLIFENLSRGFGRQGKRTFMAERQYTRMEDWLTAKLAYEGLPSKTYLSKTLAQYTSKTCSNCGFTITSADYDRVLEKLKKTATGWMTTINGKELKVEGQITYYNRYKRQNVVKDLSVELDRLSEESVNNDISSWTKGRSGEALSLLKKRFSHRPVQEKFVCLNCGFETHADEQAALNIARSWLFLRSQEYKKYQTNKTTGNTDKRAFVETWQSFYRKKLKEVWKPAV

SEQ ID NO: 1161 - protein, 976 aa, synthetic construct
  REGION 1..976: note = CasX variant
QEIKRINKIRRRLVKDSNTKKAGKTGPMKTLLVRVMTPDLRERLENLRKKPENIPQPISNTSRANLNKLLTDYTEMKKAILHVYWEEFQKDPVGLMSRVAQPASKKIDQNKLKPEMDEKGNLTTAGFACSQCGQPLFVYKLEQVSEKGKAYTNYFGRCNVAEHEKLILLAQLKPEKDSDEAVTYSLGKFGQRALDFYSIHVTKESTHPVKPLAQIAGNRYASGPVGKALSDACMGTIASFLSKYQDIIIEHQKVVKGNQKRLESLRELAGKENLEYPSVTLPPQPHTKEGVDAYNEVIARVRMWVNLNLWQKLKLSRDDAKPLLRLKGFPSFPLVERQANEVDWWDMVCNVKKLINEKKEDGKVFWQNLAGYKRQEALRPYLSSEEDRKKGKKFARYQLGDLLLHLEKKHGEDWGKVYDEAWERIDKKVEGLSKHIKLEEERRSEDAQSKAALTDWLRAKASFVIEGLKEADKDERCELKLQKWYGDLRGKPFAIEAENSILDISGFSKQYNCAFIWQKDGVKKLNLYLIINYFKGGKLRFKKIKPEAFEANRFYTVINKKSGEIVPMEVNFNFDDPNLIILPLAFGKRQGREFIWNDLLSLETGSLKLANGRVIEKTLYNRRTRQDEPALFVALTFERREVLDSSNIKPMNLIGVDRGENIPAVIALTDPEGCPLSRFKDSLGNPTHILRIGESYKEKQRTIQAKKEVEQRRAGGYSRKYASKAKNLADDMVRNTARDLLYYAVTQDAMLIFENLSRGFGRQGKRTFMAERQYTRMEDWLTAKLAYEGLPSKTYLSKTLAQYTSKTCSNCGFTITSADYDRVLEKLKKTATGWMTTINGKELKVEGQITYYNRYKRQNVVKDLSVELDRLSEESVNNDISSWTKGRSGEALSLLKKRFSHRPVQEKFVCLNCGFETHADEQAALNIARSWLFLRSQEYKKYQTNKTTGNTDKRAFVETWQSFYRKKLKEVWKPAV

SEQ ID NO: 1162 - protein, 976 aa, synthetic construct
  REGION 1..976: note = CasX variant
QEIKRINKIRRRLVKDSNTKKAGKTGPMKTLLVRVMTPDLRERLENLRKKPENIPQPISNTSRANLNKLLTDYTEMKKAILHVYWEEFQKDPVGLMSRVAQPASKKIDQNKLKPEMDEKGNLTTAGFACSQCGQPLFVYKLEQVSEKGKAYTNYFGRCNVAEHEKLILLAQLKPEKDSDEAVTYSLGKFGQRALDFYSIHVTKESTHPVKPLAQIAGNRYASGPVGKALSDACMGTIASFLSKYQDIIIEHQKVVKGNQKRLESLRELAGKENLEYPSVTLPPQPHTKEGVDAYNEVIARVRMWVNLNLWQKLKLSRDDAKPLLRLKGFPSFPLVERQANEVDWWDMVCNVKKLINEKKEDGKVFWQNLAGYKRALRPYLSSEEDRKKGKKFARYQLGDLLLHLEKKHGEDWGKVYDEAWERIDKKVEGLSKHIKLEEERRSEDAQSKAALTDWLRAKASFVIEGLKEADKDEFCRCELKLQKWYGDLRGKPFAIEAENSILDISGFSKQYNCAFIWQKDGVKKLNLYLIINYFKGGKLRFKKIKPEAFEANRFYTVINKKSGEIVPMEVNFNFDDPNLIILPLAFGKRQGREFIWNDLLSLETGSLKLANGRVIEKTLYNRRTRQDEPALFVALTFERREVLDSSNIKPMNLIGVDRGENIPAVIALTDPEGCPLSRFKDSLGNPTHILRIGESYKEKQRTIQAKKEVEQRRAGGYSRKYASKAKNLADDMVRNTARDLLYYAVTQDAMLIFENLSRGFGRQGKRTFMAERQYTRMEDWLTAKLAYEGLPSKTYLSKTLAQYTSKTCSNCGFTITSADYDRVLEKLKKTATGWMTTINGKELKVEGQITYYNRYKRQNVVKDLSVELDRLSEESVNNDISSWTKGRSGEALSLLKKRFSHRPVQEKFVCLNCGFETHADEQAALNIARSWLFLRSQEYKKYQTNKTTGNTDKRAFVETWQSFYRKKLKEVWKPAV

SEQ ID NO: 1163 - protein, 978 aa, synthetic construct
  REGION 1..978: note = CasX variant
QEIKRINKIRRRLVKDSNTKKAGKTGPMKTLLVRVMTPDLRERLENLRKKPENIPQPISNTSRANLNKLLTDYTEMKKAILHVYWEEFQKDPVGLMSRVAQPASKKIDQNKLKPEMDEKGNLTTAGFACSQCGQPLFVYKLEQVSEKGKAYTNYFGRCNVAEHEKLILLAQLKPEKDSDEAVTYSLGKFGQRALDFYSIHVTKESTHPVKPLAQIAGNRYASGPVGKALSDACMGTIASFLSKYQDIIIEHQKVVKGNQKRLESLRELAGKENLEYPSVTLPPQPHTKEGVDAYNEVIARVRMWVNLNLWQKLKLSRDDAKPLLRLKGFPSFPLVERQANEVDWWDMVCNVKKLINEKKEDGKVFWQNLAGYKRQEALRPYLSSEEDRQKGKKFARYQLGDLLLHLEKKHGEDWGKVYDEAWERIDKKVEGLSKHIKLEEERRSEDAQSKAALTDWLRAKASFVIEGLKEADKDEFCRCELKLQKWYGDLRGKPFAIEAENSILDISGFSKQYNCAFIWQKDGVKKLNLYLIINYFKGGKLRFKKIKPEAFEANRFYTVINKKSGEIVPMEVNFNFDDPNLIILPLAFGKRQGREFIWNDLLSLETGSLKLANGRVIEKTLYNRRTRQDEPALFVALTFERREVLDSSNIKPMNLIGVDRGENIPAVIALTDPEGCPLSRFKDSLGNPTHILRIGESYKEKQRTIQAKKEVEQRRAGGYSRKYASKAKNLADDMVRNTARDLLYYAVTQDAMLIFENLSRGFGRQGKRTFMAERQYTRMEDWLTAKLAYEGLPSKTYLSKTLAQYTSKTCSNCGFTITSADYDRVLEKLKKTATGWMTTINGKELKVEGQITYYNRYKRQNVVKDLSVELDRLSEESVNNDISSWTKGRSGEALSLLKKRFSHRPVQEKFVCLNCGFETHADEQAALNIARSWLFLRSQEYKKYQTNKTTGNTDKRAFVETWQSFYRKKLKEVWKPAV

SEQ ID NO: 1164 - protein, 978 aa, synthetic construct
  REGION 1..978: note = CasX variant
QEIKRLNKIRRRLVKDSNTKKAGKTGPMKTLLVRVMTPDLRERLENLRKKPENIPQPISNTSRANLNKLLTDYTEMKKAILHVYWEEFQKDPVGLMSRVAQPASKKIDQNKLKPEMDEKGNLTTAGFACSQCGQPLFVYKLEQVSEKGKAYTNYFGRCNVAEHEKLILLAQLKPEKDSDEAVTYSLGKFGQRALDFYSIHVTKESTHPVKPLAQIAGNRYASGPVGKALSDACMGTIASFLSKYQDIIIEHQKVVKGNQKRLESLRELAGKENLEYPSVTLPPQPHTKEGVDAYNEVIARVRMWVNLNLWQKLKLSRDDAKPLLRLKGFPSFPLVERQANEVDWWDMVCNVKKLINEKKEDGKVFWQNLAGYKRQEALRPYLSSEEDRKKGKKFARYQLGDLLLHLEKKHGEDWGKVYDEAWERIDKKVEGLSKHIKLEEERRSEDAQSKAALTDWLRAKASFVIEGLKEADKDEFCRCELKLQKWYGDLRGKPFAIEAENSILDISGFSKQYNCAFIWQKDGVKKLNLYLIINYFKGGKLRFKKIKPEAFEANRFYTVINKKSGEIVPMEVNFNFDDPNLIILPLAFGKRQGREFIWNDLLSLETGSLKLANGRVIEKTLYNRRTRQDEPALFVALTFERREVLDSSNIKPMNLIGVDRGENIPAVIALTDPEGCPLSRFKDSLGNPTHILRIGESYKEKQRTIQAKKEVEQRRAGGYSRKYASKAKNLADDMVRNTARDLLYYAVTQDAMLIFENLSRGFGRQGKRTFMAERQYTRMEDWLTAKLAYEGLPSKTYLSKTLAQYTSKTCSNCGFTITSADYDRVLEKLKKTATGWMTTINGKELKVEGQITYYNRYKRQNVVKDLSVELDRLSEESVNNDISSWTKGRSGEALSLLKKRFSHRPVQEKFVCLNCGFETHADEQAALNIARSWLFLRSQEYKKYQTNKTTGNTDKRAFVETWQSFYRKKLKEVWKPAV

SEQ ID NO: 1165 - protein, 978 aa, synthetic construct
  REGION 1..978: note = CasX variant
QEIKRINKIRRRLVKDSNTKKAGKTGPMKTLLVRVMTPDLRERLENLRKKPENIPQPISNTSRANLNKLLTDYTEMKKAILHVYWEEFQKDPVGLMSRVAQPASKKIDQNKLKPEMDEKGNLTTAGFACSQCGQPLFVYKLEQVSEKGKAYTNYFGRCNVAEHEKLILLAQLKPEKDSDEAVTYSLGKFGQRALDFYSIHVTKESTHPVKPLAQIAGNRYASGPVGKALSDACMGTIASFLSKYQDIIIEHQKVVKGNQKRLESLRELAGKENLEYPSVTLPPQPHTKEGVDAYNEVIARVRMWVNLNLWQKLKLSRDDAKPLLRLKGFPSFPLVERQANEVDWWDMVCNVKKLINEKKEDGKVFWQNLAGYKRQEALRPYLSSEEDRKKGKKFARYQLGDLLLHLEKKHGEDWGKVYDEAWERIDKKVEGLSKHIKLEEERRSEDAQSKAALTDWLDAKASFVIEGLKEADKDEFCRCELKLQKWYGDLRGKPFAIEAENSILDISGFSKQYNCAFIWQKDGVKKLNLYLIINYFKGGKLRFKKIKPEAFEANRFYTVINKKSGEIVPMEVNFNFDDPNLIILPLAFGKRQGREFIWNDLLSLETGSLKLANGRVIEKTLYNRRTRQDEPALFVALTFERREVLDSSNIKPMNLIGVDRGENIPAVIALTDPEGCPLSRFKDSLGNPTHILRIGESYKEKQRTIQAKKEVEQRRAGGYSRKYASKAKNLADDMVRNTARDLLYYAVTQDAMLIFENLSRGFGRQGKRTFMAERQYTRMEDWLTAKLAYEGLPSKTYLSKTLAQYTSKTCSNCGFTITSADYDRVLEKLKKTATGWMTTINGKELKVEGQITYYNRYKRQNVVKDLSVELDRLSEESVNNDISSWTKGRSGEALSLLKKRFSHRPVQEKFVCLNCGFETHADEQAALNIARSWLFLRSQEYKKYQTNKTTGNTDKRAFVETWQSFYRKKLKEVWKPAV

SEQ ID NO: 1166 - protein, 976 aa, synthetic construct
  REGION 1..976: note = CasX variant
QEIKRINKIRRRLVKDSNTKKAGKTGPMKTLLVRVMTPDLRERLENLRKKPENIPQPISNTSRANLNKLLTDYTEMKKAILHVYWEEFQKDPVGLMSRVAQPASKKIDQNKLKPEMDEKGNLTTAGFACSQCGQPLFVYKLEQVSEKGKAYTNYFGRCNVAEHEKLILLAQLKPEKDSDEAVTYSLGKFGQRALDFYSIHVTKESTHPVKPLAQIAGNRYASGPVGKALSDACMGTIASFLSKYQDIIIEHQKVVKGNQKRLESLRELAGKENLEYPSVTLPPQPHTKEGVDAYNEVIARVRMWVNLNLWQKLKLSRDDAKPLLRLKGFPSFPLVERQANEVDWWDMVCNVKKLINEKKEDGKVFWQNLAGYKRQEALRPYLSSEEDRKKGKKFARYQLGDLLLHLEKKHGEDWGKVYDEAWERIDKKVEGLSKHIKLEEERRSEDAQSKAALTDWLRAKASFVIEGLKEADKDEFCRCELKLQKWYGDLRGKPFAIEAENSDISGFSKQYNCAFIWQKDGVKKLNLYLIINYFKGGKLRFKKIKPEAFEANRFYTVINKKSGEIVPMEVNFNFDDPNLIILPLAFGKRQGREFIWNDLLSLETGSLKLANGRVIEKTLYNRRTRQDEPALFVALTFERREVLDSSNIKPMNLIGVDRGENIPAVIALTDPEGCPLSRFKDSLGNPTHILRIGESYKEKQRTIQAKKEVEQRRAGGYSRKYASKAKNLADDMVRNTARDLLYYAVTQDAMLIFENLSRGFGRQGKRTFMAERQYTRMEDWLTAKLAYEGLPSKTYLSKTLAQYTSKTCSNCGFTITSADYDRVLEKLKKTATGWMTTINGKELKVEGQITYYNRYKRQNVVKDLSVELDRLSEESVNNDISSWTKGRSGEALSLLKKRFSHRPVQEKFVCLNCGFETHADEQAALNIARSWLFLRSQEYKKYQTNKTTGNTDKRAFVETWQSFYRKKLKEVWKPAV

SEQ ID NO: 1167 - protein, 978 aa, synthetic construct
  REGION 1..978: note = CasX variant
QEIKRINKIRRRLVKDSNTKKAGKTGPMKTLLVRVMTPDLRERLENLRKKPENIPQPISNTSRANLNKLLTDYTEMKKAILHVYWEEFQKDPVGLMSRVAQPASKKIDQNKLKPEMDEKGNLTTAGFACSQCGQPLFVYKLEQVSEKGKAYTNYVGRCNVAEHEKLILLAQLKPEKDSDEAVTYSLGKFGQRALDFYSIHVTKESTHPVKPLAQIAGNRYASGPVGKALSDACMGTIASFLSKYQDIIIEHQKVVKGNQKRLESLRELAGKENLEYPSVTLPPQPHTKEGVDAYNEVIARVRMWVNLNLWQKLKLSRDDAKPLLRLKGFPSFPLVERQANEVDWWDMVCNVKKLINEKKEDGKVFWQNLAGYKRQEALRPYLSSEEDRKKGKKFARYQLGDLLLHLEKKHGEDWGKVYDEAWERIDKKVEGLSKHIKLEEERRSEDAQSKAALTDWLRAKASFVIEGLKEADKDEFCRCELKLQKWYGDLRGKPFAIEAENSILDISGFSKQYNCAFIWQKDGVKKLNLYLIINYFKGGKLRFKKIKPEAFEANRFYTVINKKSGEIVPMEVNFNFDDPNLIILPLAFGKRQGREFIWNDLLSLETGSLKLANGRVIEKTLYNRRTRQDEPALFVALTFERREVLDSSNIKPMNLIGVDRGENIPAVIALTDPEGCPLSRFKDSLGNPTHILRIGESYKEKQRTIQAKKEVEQRRAGGYSRKYASKAKNLADDMVRNTARDLLYYAVTQDAMLIFENLSRGFGRQGKRTFMAERQYTRMEDWLTAKLAYEGLPSKTYLSKTLAQYTSKTCSNCGFTITSADYDRVLEKLKKTATGWMTTINGKELKVEGQITYYNRYKRQNVVKDLSVELDRLSEESVNNDISSWTKGRSGEALSLLKKRFSHRPVQEKFVCLNCGFETHADEQAALNIARSWLFLRSQEYKKYQTNKTTGNTDKRAFVETWQSFYRKKLKEVWKPAV

SEQ ID NO: 1168 - protein, 979 aa, synthetic construct
  REGION 1..979: note = CasX variant
QEIKRINKIRRRLVKDSNTKKAGKTGPMKTLLVRVMTPDLRERLENLRKKPENIPQPISNTSRANLNKLLTDYTEMKKAILHVYWEEFQKDPVGLMSRVAQPASKKIDQNKLKPEMDEKGNLTTAGFACSQCGQPLFVYKLEQVSEKGKAYTNYFGRCNVAEHEKLILLAQLKPEKDSDEAVTYSLGKFGQRALDFYSIHVTKESTHPVKPLAQIAGNRYASGPVGKALSDACMGTIASFLSKYQDIIIEHQKVVKGNQKRLESLRELAGKENLEYPSVTLPPQPHTKEGVDAYNEVIARVRMWVNLNLWQKLKLSRDDAKPLLRLKGFPSFPLVERQANEVDWWDMVCNVKKLINGEKKEDGKVFWQNLAGYKRQEALRPYLSSEEDRKKGKKFARYQLGDLLLHLEKKHGEDWGKVYDEAWERIDKKVEGLSKHIKLEEERRSEDAQSKAALTDWLRAKASFVIEGLKEADKDEFCRCELKLQKWYGDLRGKPFAIEAENSILDISGFSKQYNCAFIWQKDGVKKLNLYLIINYFKGGKLRFKKIKPEAFEANRFYTVINKKSGEIVPMEVNFNFDDPNLIILPLAFGKRQGREFIWNDLLSLETGSLKLANGRVIEKTLYNRRTRQDEPALFVALTFERREVLDSSNIKPMNLIGVDRGENIPAVIALTDPEGCPLSRFKDSLGNPTHILRIGESYKEKQRTIQAKKEVEQRRAGGYSRKYASKAKNLADDMVRNTARDLLYYAVTQDAMLIFENLSRGFGRQGKRTFMAERQYTRMEDWLTAKLAYEGLPSKTYLSKTLAQYTSKTCSNCGFTITSADYDRVLEKLKKTATGWMTTINGKELKVEGQITYYNRYKRQNVVKDLSVELDRLSEESVNNDISSWTKGRSGEALSLLKKRFSHRPVQEKFVCLNCGFETHADEQAALNIARSWLFLRSQEYKKYQTNKTTGNTDKRAFVETWQSFYRKKLKEVWKPAV

SEQ ID NO: 1169 - protein, 978 aa, synthetic construct
  REGION 1..978: note = CasX variant
QEIKRINKIRRRLVKDSNTKKAGKTGPMKTLLVRVMTPDLRERLENLRKKPENIPQPISNTSRANLNKLLTDYTEMKKAILHVYWEEFQKDPVGLMSRVAQPASKKIDQNKLKPEMDEKGNLTTAGFACSQCGQPLFVYKLEQVSEKGKAYTNYFGRCNVAEHEKLILLAQLKPEKDSDEAVTYSLGKFGQRALDFYSIHVTKESTHPVKPLAQIAGNRFASGPVGKALSDACMGTIASFLSKYQDIIIEHQKVVKGNQKRLESLRELAGKENLEYPSVTLPPQPHTKEGVDAYNEVIARVRMWVNLNLWQKLKLSRDDAKPLLRLKGFPSFPLVERQANEVDWWDMVCNVKKLINEKKEDGKVFWQNLAGYKRQEALRPYLSSEEDRKKGKKFARYQLGDLLLHLEKKHGEDWGKVYDEAWERIDKKVEGLSKHIKLEEERRSEDAQSKAALTDWLRAKASFVIEGLKEADKDEFCRCELKLQKWYGDLRGKPFAIEAENSILDISGFSKQYNCAFIWQKDGVKKLNLYLIINYFKGGKLRFKKIKPEAFEANRFYTVINKKSGEIVPMEVNFNFDDPNLIILPLAFGKRQGREFIWNDLLSLETGSLKLANGRVIEKTLYNRRTRQDEPALFVALTFERREVLDSSNIKPMNLIGVDRGENIPAVIALTDPEGCPLSRFKDSLGNPTHILRIGESYKEKQRTIQAKKEVEQRRAGGYSRKYASKAKNLADDMVRNTARDLLYYAVTQDAMLIFENLSRGFGRQGKRTFMAERQYTRMEDWLTAKLAYEGLPSKTYLSKTLAQYTSKTCSNCGFTITSADYDRVLEKLKKTATGWMTTINGKELKVEGQITYYNRYKRQNVVKDLSVELDRLSEESVNNDISSWTKGRSGEALSLLKKRFSHRPVQEKFVCLNCGFETHADEQAALNIARSWLFLRSQEYKKYQTNKTTGNTDKRAFVETWQSFYRKKLKEVWKPAV

SEQ ID NO: 1170 - protein, 978 aa, synthetic construct
  REGION 1..978: note = CasX variant
QEIKRINKIRRRLVKDSNTKKAGKTGPMKTLLVRVMTPDLRERLENLRKKPENIPQPISNTSRANLNKLLTDYTEMKKAILHVYWEEFQKDPVGLMSRVAQPASKKIDQNKLKPEMDEKGNLTTAGFACSQCGQPLFVYKLEQVSEKGKAYTNYFGRCNVAEHEKLILLAQLKPEKDSDEAVTYSLGKFGQRALDFYSIHVTKESTHPVKPLAQIAGNRYASGPVGKALSDACMGTIASFLSKYQDIIIEHQKVVKGNQKRLESLRELAGKENLEYPSVTLPPQPHTKEGVDAYNEVIARVRMWVNLNLWQKLKLSRDDAKPLLRLKGFPSFPLVERQANEVDWWDMVCNVKKLINEKKEDGKVFWQNLAGYKRQEALRPYLSSEEDRKKGKKFARYQLGDLLLHLEKKHGEDWGKVYDEAWERIDKKVEGLSKHIKLEEERRSEDAQSKAALTDWLRAKASFVIEGLKEADKDEFCRCELKLQKWYGDLRGKPFAIEAENSILDISGFSKQYNCAFIWQKDGVKKLNLYLIINYFKGGKLRFKKIKPEAFEANRFYTVINKKSGEIVPMEVNFNFDDPNLIILPLAFGKRQGREFIWNDLLSLETGSLKLANGRVIEKTLYNRRTRQDEPALFVALTFERREVLDSSNIKPMNLIGVDRGENIPAVIALTDPEGCPLSRFKDSLGNPTHILRIGESYKEKQRTIQAKKEVEQRRAGGYSRKYASKAKNLADDMVRNTARDLLYYAVTQDAMLIFENLSRGFGRQGKRTFMAERQYTRMEDWYTAKLAYEGLPSKTYLSKTLAQYTSKTCSNCGFTITSADYDRVLEKLKKTATGWMTTINGKELKVEGQITYYNRYKRQNVVKDLSVELDRLSEESVNNDISSWTKGRSGEALSLLKKRFSHRPVQEKFVCLNCGFETHADEQAALNIARSWLFLRSQEYKKYQTNKTTGNTDKRAFVETWQSFYRKKLKEVWKPAV

SEQ ID NO: 1171 - protein, 979 aa, synthetic construct
  REGION 1..979: note = CasX variant
QEIKRINKIRRRLVKDSNTKKAGKTGPMKTLLVRVMTPDLRERLENLRKKPENIPQPISNTSRANLNKLLTDYTEMKKAILHVYWEEFQKDPVGLMSRVAQPASKKIDQNKLKPEMDEKGNLTTAGFACSQCGQPLFVYKLEQVSEKGKAYTNYFGRCNVAEHEKLILLAQLKPEKDSDEAVTYSLGKFGQRALDFYSIHVTKESTHPVKPLAQIAGNRYASGPVGKALSDACMGTIASFLSKYQDIIIEHQKVVKGNQKRLESLRELAGKENLEYPSVTLPPQPHTKEGVDAYNEVIARVRMWVNLNLWQKLKLSRDDAKPLLRLKGFPSFPLVERQANEVDWWDMVPCNVKKLINEKKEDGKVFWQNLAGYKRQEALRPYLSSEEDRKKGKKFARYQLGDLLLHLEKKHGEDWGKVYDEAWERIDKKVEGLSKHIKLEEERRSEDAQSKAALTDWLRAKASFVIEGLKEADKDEFCRCELKLQKWYGDLRGKPFAIEAENSILDISGFSKQYNCAFIWQKDGVKKLNLYLIINYFKGGKLRFKKIKPEAFEANRFYTVINKKSGEIVPMEVNFNFDDPNLIILPLAFGKRQGREFIWNDLLSLETGSLKLANGRVIEKTLYNRRTRQDEPALFVALTFERREVLDSSNIKPMNLIGVDRGENIPAVIALTDPEGCPLSRFKDSLGNPTHILRIGESYKEKQRTIQAKKEVEQRRAGGYSRKYASKAKNLADDMVRNTARDLLYYAVTQDAMLIFENLSRGFGRQGKRTFMAERQYTRMEDWLTAKLAYEGLPSKTYLSKTLAQYTSKTCSNCGFTITSADYDRVLEKLKKTATGWMTTINGKELKVEGQITYYNRYKRQNVVKDLSVELDRLSEESVNNDISSWTKGRSGEALSLLKKRFSHRPVQEKFVCLNCGFETHADEQAALNIARSWLFLRSQEYKKYQTNKTTGNTDKRAFVETWQSFYRKKLKEVWKPAV

SEQ ID NO: 1172 - protein, 979 aa, synthetic construct
  REGION 1..979: note = CasX variant
QEIKRINKIRRRLVKDSNTKKAGKTGPMKTLLVRVMTPDLRERLENLRKKPENIPQPISNTSRANLNKLLTDYTEMKKAILHVYWEEFQKDPVGLMSRVAQPASKKIDQNKLKPEMDEKGNLTTAGFACSQCGQPLFVYKLEQVSEKGKAYTNYFGRCNVAEHEKLILLAQLKPEKDSDEAVTYSLGKFGQRALDFYSIHVTKESTHPVKPLAQTIAGNRYASGPVGKALSDACMGTIASFLSKYQDIIIEHQKVVKGNQKRLESLRELAGKENLEYPSVTLPPQPHTKEGVDAYNEVIARVRMWVNLNLWQKLKLSRDDAKPLLRLKGFPSFPLVERQANEVDWWDMVCNVKKLINEKKEDGKVFWQNLAGYKRQEALRPYLSSEEDRKKGKKFARYQLGDLLLHLEKKHGEDWGKVYDEAWERIDKKVEGLSKHIKLEEERRSEDAQSKAALTDWLRAKASFVIEGLKEADKDEFCRCELKLQKWYGDLRGKPFAIEAENSILDISGFSKQYNCAFIWQKDGVKKLNLYLIINYFKGGKLRFKKIKPEAFEANRFYTVINKKSGEIVPMEVNFNFDDPNLIILPLAFGKRQGREFIWNDLLSLETGSLKLANGRVIEKTLYNRRTRQDEPALFVALTFERREVLDSSNIKPMNLIGVDRGENIPAVIALTDPEGCPLSRFKDSLGNPTHILRIGESYKEKQRTIQAKKEVEQRRAGGYSRKYASKAKNLADDMVRNTARDLLYYAVTQDAMLIFENLSRGFGRQGKRTFMAERQYTRMEDWLTAKLAYEGLPSKTYLSKTLAQYTSKTCSNCGFTITSADYDRVLEKLKKTATGWMTTINGKELKVEGQITYYNRYKRQNVVKDLSVELDRLSEESVNNDISSWTKGRSGEALSLLKKRFSHRPVQEKFVCLNCGFETHADEQAALNIARSWLFLRSQEYKKYQTNKTTGNTDKRAFVETWQSFYRKKLKEVWKPAV

SEQ ID NO: 1173 - protein, 978 aa, synthetic construct
  REGION 1..978: note = CasX variant
QEIKRINKIRRRLVKDSNTKKAGKTGPMKTLLVRVMTPDLRERLENLRKKPENIPQPISNTSRANLNKLLTDYTEMKKAILHVYWEEFQKDPVGLMSRVAQPASKKIDQNKLKPEMDEKGNLTTAGFACSQCGQPLFVYKLEQVSEKGKAYTNYFGRCNVAEHEKLILLAQLKPEKDSDEAVTYSLGKFGQRALDFYSIHVTKESTHPVKPLAQIAGNRYASGPVGKALSDACMGTIASFLSKYQDIIIEHQKVVKGNQKRLESLRELAGKENLEYPSVTLPPQPHTKEGVDAYNEVIARVRMWVNLNLWQKLKLSRDDAKPLLRLKGFPSFPLVERQANEVDWWDMVCNVKKLINEKKEDGKVFWQNLAGYKRQEALRPYLSSEEDRKKGKKFARYQLGDLLLHLEKKHGEDWGKVYDEAWERIDKKVEGLSKHIKLEEERRSEDAQSKAALTDWLRAKASFVIEGLKEADKDEFCRCELKLQKWYGDLRGKPFAIEAENSILDISGFSKQYNCAFIWQKDGVKKLNLYLIINYFKGGKLRFKKIKPEAFEANRFYTVINKKSGEIVPMEVNFNFDDPNLIILPLAFGKRQGREFIWNDLLSLETGSLKLANGRVIEKTLYNRRTRQDEPALFVALTFERREVLDSSNIKPMNLIGVDRGENIPAVIALTDPEGCPLSRFKDSLGNPTHILRIGESYKEKQRTIQAKKEVEQRRAGGYSRKYASKAKNLADDMVRNTARDLLYYAVTQDAMLIFENLSRGFGRQGKRTFMAERQYTRMEDWLTAKLAYEGLPSKTYLSKTLAQYTSKTCSNCGFTITSADYDRVLEKLKKTATGWMTTINGKELKVEGQITYYNRYKRQNVVKDLSVELDRLSEESVNNDISSWTKGRSGEALSLLKKRFSHRPCQEKFVCLNCGFETHADEQAALNIARSWLFLRSQEYKKYQTNKTTGNTDKRAFVETWQSFYRKKLKEVWKPAV

SEQ ID NO: 1174 - protein, 979 aa, synthetic construct
  REGION 1..979: note = CasX variant
QEIKRINKIRRRLVKDSNTKKAGKTGPMKTLLVRVMTPDLRERLENLPRKKPENIPQPISNTSRANLNKLLTDYTEMKKAILHVYWEEFQKDPVGLMSRVAQPASKKIDQNKLKPEMDEKGNLTTAGFACSQCGQPLFVYKLEQVSEKGKAYTNYFGRCNVAEHEKLILLAQLKPEKDSDEAVTYSLGKFGQRALDFYSIHVTKESTHPVKPLAQIAGNRYASGPVGKALSDACMGTIASFLSKYQDIIIEHQKVVKGNQKRLESLRELAGKENLEYPSVTLPPQPHTKEGVDAYNEVIARVRMWVNLNLWQKLKLSRDDAKPLLRLKGFPSFPLVERQANEVDWWDMVCNVKKLINEKKEDGKVFWQNLAGYKRQEALRPYLSSEEDRKKGKKFARYQLGDLLLHLEKKHGEDWGKVYDEAWERIDKKVEGLSKHIKLEEERRSEDAQSKAALTDWLRAKASFVIEGLKEADKDEFCRCELKLQKWYGDLRGKPFAIEAENSILDISGFSKQYNCAFIWQKDGVKKLNLYLIINYFKGGKLRFKKIKPEAFEANRFYTVINKKSGEIVPMEVNFNFDDPNLIILPLAFGKRQGREFIWNDLLSLETGSLKLANGRVIEKTLYNRRTRQDEPALFVALTFERREVLDSSNIKPMNLIGVDRGENIPAVIALTDPEGCPLSRFKDSLGNPTHILRIGESYKEKQRTIQAKKEVEQRRAGGYSRKYASKAKNLADDMVRNTARDLLYYAVTQDAMLIFENLSRGFGRQGKRTFMAERQYTRMEDWLTAKLAYEGLPSKTYLSKTLAQYTSKTCSNCGFTITSADYDRVLEKLKKTATGWMTTINGKELKVEGQITYYNRYKRQNVVKDLSVELDRLSEESVNNDISSWTKGRSGEALSLLKKRFSHRPVQEKFVCLNCGFETHADEQAALNIARSWLFLRSQEYKKYQTNKTTGNTDKRAFVETWQSFYRKKLKEVWKPAV

SEQ ID NO: 1175 - protein, 978 aa, synthetic construct
  REGION 1..978: note = CasX variant
QEIKRINKIRRRLVKDSNTKKAGKTGPMKTLLVRVMTPDLRERLENLRKKPENIPQPISNTSRANLNKLLTDYTEMKKAILHVYWEEFQKDPVGLMSRVAQPASKKIDQNKLKPEMDEKGNLTTAGFACSQCGQPLFVYKLEQVSEKGKAYTNYFGRCNVAEHEKLILLAQLKPEKDSDEAVTYSLGKFGQRALDFYSIHVTKESTHPVKPLAQIAGNRYASGPVGKALSDACMGTIASFLSKYQDIIIEHQKVVKGNQKRLESLRELAGKENLEYPSVTLPPQPHTKEGVDAYNEVIARVRMWVNLNLWQKLKLSRDDAKPLLRLKGFPSFPLVERQANEVDWWDMVCNVKKLINEKKEDGKVFWQNLAGYKRQEALRPYLSSEEDRKKGKKFARYQLGDLLLHLEKKHGEDWGKVYDEAWERIDKKVEGLSKHIKLEEERRSEDAQSKAALTDWLRAKASFVIEGLKEADKDEFCRCELKLQKWYGDLRGKPFAIEAENSILDISGFSKQYNCAFIWQKDGVKKLNLYLIINYFKGGKLRFKKIKPEAFEANRFYTVINKKSGEIVPMEVNFNFDDPNLIILPLAFGKRQGREFIWNDLLSLETGSLKLANGRVIEKTLYNRRTRQDEPALFVALTFERREVLDSSNIKPMNLIGVDRGENIPAVIALTDPEGCPLSRFKDSLGNPTHILRIGESYKEKQRTIQAKKEVEQRRAGGYSRKYASKAKNLADDMVRNTARDLLYYAVTQDAMLIFENLSRGFGRQGKRTFMAERQYTRMEDWLTAKLAYEGLPSKTYLSKTLAQYTSKTCSNCGFTITSADYDRVLEGLKKTATGWMTTINGKELKVEGQITYYNRYKRQNVVKDLSVELDRLSEESVNNDISSWTKGRSGEALSLLKKRFSHRPVQEKFVCLNCGFETHADEQAALNIARSWLFLRSQEYKKYQTNKTTGNTDKRAFVETWQSFYRKKLKEVWKPAV

SEQ ID NO: 1176 - protein, 977 aa, synthetic construct
  REGION 1..977: note = CasX variant
QEIKRINKIRRRLVKDSNTKKAGKTGPMKTLLVRVMTPDLRERLENLRKKPENIPQPISNTSRANLNKLLTDYTEMKKAILHVYWEEFQKDPVGLMSRVAQPASKKIDQNKLKPEMDEKGNLTTAGFACSQCGQPLFVYKLEQVSEKGKAYTNYFGRCNVAEHEKLILLAQLKPEKDSDEAVTYSLGKFGQRALDFYSIHVTKESTHPVKPLAQIAGNRYASGPVGKALSDACMGTIASFLSKYQDIIIEHQKVVKGNQKRLESLRELAGKENLEYPSVTLPPQPHTKEGVDAYNEVIARVRMWVNLNLWQKLKLSRDDAKPLLRLKGFPSFPLVERQANEVDWWDMVCNVKKLINEKKEDGKVFWQNLAGYKRQEALRPYLSSEEDRKKGKKFARYQLGDLLLHLEKKHGEDWGKVYDEAWERIDKKVEGLSKHIKLEEERRSEDAQSKAALTDWLRAKASFVIEGLKEADKDEFCRCELKLQKWYGDLRGKPFAIEAENSILDISGFSKQYNCAFIWQKDGVKKLNLYLIINYFKGGKLRFKKIKPEAFEANRFYTVINKKSGEIVPMEVNFNFDDPNLIILPLAFGKRQGREFIWNDLLSLETGSLKLANGRVIEKTLYNRRTRQDEPALFVALTFERREVLDSSNIKPMNLIGVDRGENIPAVIALTDPEGCPLSRFKDSLGNPTHILRIGESYKEKQRTIQAKKEVEQRRAGGYSRKYASKAKNLADDMVRNTARDLLYYAVTQDAMLIFENLSRGFGRQGKRTFMAERQYTRMEDWLTAKLAYEGLPSKTYLSKTLAQTSKTCSNCGFTITSADYDRVLEKLKKTATGWMTTINGKELKVEGQITYYNRYKRQNVVKDLSVELDRLSEESVNNDISSWTKGRSGEALSLLKKRFSHRPVQEKFVCLNCGFETHADEQAALNIARSWLFLRSQEYKKYQTNKTTGNTDKRAFVETWQSFYRKKLKEVWKPAV

SEQ ID NO: 1177 - protein, 979 aa, synthetic construct
  REGION 1..979: note = CasX variant
QEIKRINKIRRRLVKDSNTKKAGKTGPMKTLLVRVMTPDLRERLENLRKKPENIPQPISNTSRANLNKLLTDYTEMKKAILHVYWEEFQKDPVGLMSRVAQPASKKIDQNKLKPEMDEKGNLTTAGFACSQCGQPLFVYKLEQVSEKGKAYTNYFGRCNVAEHEKLILLAQLKPEKDSDEAVTYSLGKFGQRALDFYSIHVTKESTHPVKPLAQIAGNRYASGPVGKALSDACMGTIASFLSKYQDIIIEHQKVVKGNQKRLESLRELAGKENLEYPSVTLPPQPHTKEGVDAYNEVIARVRMWVNLNLWQKLKLSRDDAKPLLRLKGFPSFPLVERQANEVDWWDMVCNVKKLINEKKEDGKVFWQNLAGYKRQEALRPYLSSEEDRKKGKKFARYQLGDLLLHLEKKHGEDWGKVYDEAWERIDKKVEGLSKHIKLEEERRSEDAQSKAALTDWLRAKASFVIEGLKEADKDEFCRCELKLQKWYGDLRGKPFAIEAENSILDISGFSKQYNCAFIWQKDGVKKLNLYLIINYFKGGKLRFKKIKPEAFEANRFYTVINKKSGEIVPMEVNFNFDDPNLIILPLAFGKRQGREFIWNDLLSLETGSLKLANGRVIEKTLYNRRTRQDEPALFVALTFERREVLDSSNIKPMNLIGVDRGENIPAVIALTDPEGCPLSRFKDSLGNPTHILRIGESYKEKQRTIQAKKEVEQRRAGGYSRKYASKAKNLADDMVRNTARDLLYYAVTQDAMLIFENLSRGFGRQGKRTFMAERQYTRMEDWLTAKLAYEGLPSKTYLSKTLAQYTISKTCSNCGFTITSADYDRVLEKLKKTATGWMTTINGKELKVEGQITYYNRYKRQNVVKDLSVELDRLSEESVNNDISSWTKGRSGEALSLLKKRFSHRPVQEKFVCLNCGFETHADEQAALNIARSWLFLRSQEYKKYQTNKTTGNTDKRAFVETWQSFYRKKLKEVWKPAV

SEQ ID NO: 1178 - protein, 978 aa, synthetic construct
  REGION 1..978: note = CasX variant
QEIKRINKIRRRLVKDSNTKKAGKTGPMKTLLVRVMTPDLRERLENLRKKPENIPQPISNTSRANLNKLLTDYTEMKKAILHVYWEEFQKDPVGLMSRVAQPASKKIDQNKLKPEMDEKGNLTTAGFACSQCGQPLFVYKLEQVSEKGKAYTNYFGRCNVAEHEKLILLAQLKPEKDSDEAVTYSLGKFGQRALDFYSIHVTKESTHPVKPLAQIAGNRYASGPVGKALSDACMGTIASFLSKYQDIIIEHQKVVKGNQKRLESLRELAGKENLEYPSVTLPPQPHTKEGVDAYNEVIARVRMWVNLNLWQKLKLSRDDAKPLLRLKGFPSFPLVERQANEVDWWDMVCNVKKLINEKKEDGKVFWQNLAGYKRQEALRPYLSSEEDRKKGKKFARYQLGDLLLHLEKKHGEDWGKVYDEAWERIDKKVEGLSKHIKLEEERRSEDAQSKAALTDWLRAKASFVIEGLKEADKDEFCRCELKLQKWYGDLRGKPFAIEAENSILDISGFSKQYNCAFIWQKDGVKKLNLYLIINYFKGGKLRFKKIKPEAFEANRFYTVINKKSGEIVPMEVNFNFDDPNLIILPLAFGKRQGREFIWNDLLSLETGSLKLANGRVIEKTLYNRRTRQDEPALFVALTFERREVLDSSNIKPMNLIGVDRGENIPAVIALTDPEGCPLSRFKDSLGNPTHILRIGESYKEKQRTIQAKKEVEQRRAGGYSRKYASKAKNLADDMVRNTARDLLYYAVTQDAMLIFENLSRGFGRQGKRTFMAERQYTRMEDWLTAKLAYEGLPSKTYLSKTLAQYTSKTKSNCGFTITSADYDRVLEKLKKTATGWMTTINGKELKVEGQITYYNRYKRQNVVKDLSVELDRLSEESVNNDISSWTKGRSGEALSLLKKRFSHRPVQEKFVCLNCGFETHADEQAALNIARSWLFLRSQEYKKYQTNKTTGNTDKRAFVETWQSFYRKKLKEVWKPAV

SEQ ID NO: 1179 - protein, 978 aa, synthetic construct
  REGION 1..978: note = CasX variant
QEIKRINKIRRRLVKDSNTKKAGKTGPMKTLLVRVMTPDLRERLENLRKKPENIPQPISNTSRANLNKLLTDYTEMKKAILHVYWEEFQKDPVGLMSRVAQPASKKIDQNKLKPEMDEKGNLTTAGFACSQCGQPLFVYKLEQVSEKGKAYTNYFGRCNVAEHEKLILLAQLKPEKDSDEAVTYSLGKFGQRALDFYSIHVTKESTHPVKPLAQIAGNRYASGPVGKALSDACMGTIASFLSKYQDIIIEHQKVVKGNQKRLESLRELAGKENLEYPSVTLPPQPHTKEGVDAYNEVIARVRMWVNLNLWQKLKLSRDDAKPLLRLKGFPSFPLVERQANEVDWWDMVCNVKKLINEKKEDGKVFWQNLAGYKRQEALRPYLSSEEDRKKGKKFARYQLGDLLLHLEKKHGEDWGKVYDEAWERIDKKVEGLSKHIKLEEERRSEDAQSKAALTDWLRAKASFVIEGLKEADKDEFCRCELKLQKWYGDLRGKPFAIEAENSILDISGFSKQYNCAFIWQKDGVKKLNLYLIINYFKGGKLRFKKIKPEAFEANRFYTVINKKSGEIVPMEVNFNFDDPNLIILPLAFGKRQGREFIWNDLLSLETGSLKLANGRVIEKTLYNRRTRQDEPALFVALTFERREVLDSSNIKPMNLIGVDRGENIPAVIALTDPEGCPLSRFKDSLGNPTHILRIGESYKEKQRTIQAKKEVEQRRAGGYSRKYASKAKNLADDMVRNTARDLLYYAVTQDAMLIFENLSRGFGRQGKRTFMAERQYTRMEDWLTAKLAYEGLPSKTYLSKQLAQYTSKTCSNCGFTITSADYDRVLEKLKKTATGWMTTINGKELKVEGQITYYNRYKRQNVVKDLSVELDRLSEESVNNDISSWTKGRSGEALSLLKKRFSHRPVQEKFVCLNCGFETHADEQAALNIARSWLFLRSQEYKKYQTNKTTGNTDKRAFVETWQSFYRKKLKEVWKPAV

SEQ ID NO: 1180 - protein, 978 aa, synthetic construct
  REGION 1..978: note = CasX variant
QEIKRINKIRRRLVKDSNTKKAGKTGPMKTLLVRVMTPDLRERLENLRKKPENIPQPISNTSRANLNKLLTDYTEMKKAILHVYWEEFQKDPVGLMSRVAQPASKKIDQNKLKPEMDEKGNLTTAGFACSQCGQPLFVYKLEQVSEKGKAYTNYFGRCNVAEHEKLILLAQLKPEKDSDEAVTYSLGKFGQRALDFYSIHVTKESTHPVKPLAQIAGNRYASGPVGKALSDACMGTIASFLSKYQDIIIEHQKVVKGNQKRLESLRELAGKENLEYPSVTLPPQPHTKEGVDAYNEVIARVRMWVNLNLWQKLKLSRDDAKPLLRLKGFPSFPLVERQANEVDWWDMVCNVKKLINEKKEDGKVFWQNLAGYKRQEALRPYLSSEEDRKKGKKFARYQLGDLLLHLEKKHGEDWGKVYDEAWERIDKKVEGLSKHIKLEEERRSEDAQSKAALTDWLRAKASFVIEGLKEADKDEFCRCELKLQKWYGDLRGKPFAIEAENSILDISGFSKQYNCAFIWQKDGVKKLNLYLIINYFKGGKLRFKKIKPEAFEANRFYTVINKKSGEIVPMEVNFNFDDPNLIILPLAFGKRQGREFIWNDLLSLETGSLKLANGRVIEKTLYNRRTRQDEPALFVALTFERREVLDSSNIKPMNLIGVDRGENIPAVIALTDPEGCPLSRFKDSLGNPTHILRIGESYKEKQRTIQAKKEVEQRRAGGYSRKYASKAKNLADDMVRNTARDLLYYAVTQDAMLIFENLSRGFGRQGKRTFMAERQYTRMEDWLTAKLAYEGLPSKTYLSKTLAQYYSKTCSNCGFTITSADYDRVLEKLKKTATGWMTTINGKELKVEGQITYYNRYKRQNVVKDLSVELDRLSEESVNNDISSWTKGRSGEALSLLKKRFSHRPVQEKFVCLNCGFETHADEQAALNIARSWLFLRSQEYKKYQTNKTTGNTDKRAFVETWQSFYRKKLKEVWKPAV

SEQ ID NO: 1181 - protein, 978 aa, synthetic construct
  REGION 1..978: note = CasX variant
QEIKRINKIRRRLVKDSNTKKAGKTGPMKTLLVRVMTPDLRERLENLRKKPENIPQPISNTSRANLNKLLTDYTEMKKAILHVYWEEFQKDPVGLMSRVAQPASKKIDQNKLKPEMDEKGNLTTAGFACSQCGQPLFVYKLEQVSEKGKAYTNYFGRCNVAEHEKLILLAQLKPEKDSDEAVTYSLGKFGQRALDFYSIHVTKESTHPVKPLAQIAGNRYASGPVGKALSDACMGTIASFLSKYQDIIIEHQKVVKGNQKRLESLRELAGKENLEYPSVTLPPQPHTKEGVDAYNEVIARVRMWVNLNLWQKLKLSRDDAKPLLRLKGFPSFPLVERQANEVDWWDMVCNVKKLINEKKEDGKVFWQNLAGYKRQEALRPYLSSEEDRKKGKKFARYQLGDLLLHLEKKHGEDWGKVYDEAWERIDKKVEGLSKHIKLEEERRSEDAQSKAALTDWLRAKASFVIEGLKEADKDEFCRCELKLQKWYGDLRGKPFAIEAENSILDISGFSKQYNCAFIWQKDGVKKLNLYLIINYFKGGKLRFKKIKPEAFEANRFYTVINKKSGEIVPMEVNFNFDDPNLIILPLAFGKRQGREFIWNDLLSLETGSLKLANGRVIEKTLYNRRTRQDEPALFVALTFERREVLDSSNIKPMNLIGVDRGENIPAVIALTDPEGCPLSRFKDSLGNPTHILRIGESYKEKQRTIQAKKEVEQRRAGGYSRKYASKAKNLADDMVRNTARDLLYYAVTQDAMLIFENLSRGFGRQGKRTFMAERQYTRMEDWLTAKLAYEGLPSKTYLSKTLAKYTSKTCSNCGFTITSADYDRVLEKLKKTATGWMTTINGKELKVEGQITYYNRYKRQNVVKDLSVELDRLSEESVNNDISSWTKGRSGEALSLLKKRFSHRPVQEKFVCLNCGFETHADEQAALNIARSWLFLRSQEYKKYQTNKTTGNTDKRAFVETWQSFYRKKLKEVWKPAV

SEQ ID NO: 1182 - protein, 978 aa, synthetic construct
  REGION 1..978: note = CasX variant
QEIKRINKIRRRLVKDSNTKKAGKTGPMKTLLVRVMTPDLRERLENLRKKPENIPQPISNTSRANLNKLLTDYTEMKKAILHVYWEEFQKDPVGLMSRVAQPASKKIDQNKLKPEMDEKGNLTTAGFACSQCGQPLFVYKLEQVSEKGKAYTNYFGRCNVAEHEKLILLAQLKPEKDSDEAVTYSLGKFGQRALDFYSIHVTKESTHPVKPLAQIAGNRYASGPVGKALSDACMGTIASFLSKYQDIIIEHQKVVKGNQKRLESLRELAGKENLEYPSVTLPPQPHTKEGVDAYNEVIARVRMWVNLNLWQKLKLSRDDAKPLLRLKGFPSFPLVERQANEVDWWDMVCNVKKLINEKKEDGKVFWQNLAGYKRQEALRPYLSSEEDRKKGKKFARYQLGDLLLHLEKKHGEDWGKVYDEAWERIDKKVEGLSKHIKLEEERRSEDAQSKAALTDWLRAKASFVIEGLKEADKDEFCRCELKLQKWYGDLRGKPFAIEAENSILDISGFSKQYNCAFIWQKDGVKKLNLYLIINYFKGGKLRFKKIKPEAFEANRFYTVINKKSGEIVPMEVNFNFDDPNLIILPLAFGKRQGREFIWNDLLSLETGSLKLANGRVIEKTLYNRRTRQDEPALFVALTFERREVLDSSNIKPMNLIGVDRGENIPAVIALTDPEGCPLSRFKDSLGNPTHILRIGESYKEKQRTIQAKKEVEQRRAGGYSRKYASKAKNLADDMVRNTARDLLYYAVTQDAMLIFENLSRGFGRQGKRTFMAERQYTRMEDWLTAKLAYEGLASKTYLSKTLAQYTSKTCSNCGFTITSADYDRVLEKLKKTATGWMTTINGKELKVEGQITYYNRYKRQNVVKDLSVELDRLSEESVNNDISSWTKGRSGEALSLLKKRFSHRPVQEKFVCLNCGFETHADEQAALNIARSWLFLRSQEYKKYQTNKTTGNTDKRAFVETWQSFYRKKLKEVWKPAV

SEQ ID NO: 1183 - protein, 979 aa, synthetic construct
  REGION 1..979: note = CasX variant
QEIKRINKIRRRLVKDSNTKKAGKTGPMKTLLVRVMTPDLRERLENLRKKPENIPQPISNTSRANLNKLLTDYTEMKKAILHVYWEEFQKDPVGLMSRVAQPASKKIDQNKLKPEMDEKGNLTTAGFACSQCGQPLFVYKLEQVSEKGKAYTNYFGRCNVAEHEKLILLAQLKPEKDSDEAVTYSLGKFGQRALDFYSIHVTKESTHPVKPLAQIAGNRYASGPVGKALSDACMGTIASFLSKYQDIIIEHQKVVKGNQKRLESLRELAGKENLEYPSVTLPPQPHTKEGVDAYNEVIARVRMWVNLNLWQKLKLSRDDAKPLLRLKGFPSFPLVERQANEVDWWDMVCNVKKLINEKKEDGKVFWQNLAGYKRQEALRPYLSSEEDRKKGKKFARYQLGDLLLHLEKKHGEDWGKVYDEAWERIDKKVEGLSKHIKLEEERRSEDAQSKAALTDWLRAKASFVIEGLKEADKDEFCRCELKLQKWYGDLRGKPFAIEAENSILDISGFSKQYNCAFIWQKDGVKKLNLYLIINYFKGGKLRFKKIKPEAFEANRFYTVINKKSGEIVPMEVNFNFDDPNLIILPLAFGKRQGREFIWNDLLSLETGSLKLANGRVIEKTLYNRRTRQDEPALFVALTFERREVLDSSNIKPMNLIGVDRGENIPAVIALTDPEGCPLSRFKDSLGNPTHILRIGESYKEKQRTIQAKKEVEQRRAGGYSRKYASKAKNLADDMVRNTARDLLYYAVTQDAMLIFENLSRGFGRQGKRTFMAERQYTRMEDWLTAKLAYEGLPSKTYLSKTLLAQYTSKTCSNCGFTITSADYDRVLEKLKKTATGWMTTINGKELKVEGQITYYNRYKRQNVVKDLSVELDRLSEESVNNDISSWTKGRSGEALSLLKKRFSHRPVQEKFVCLNCGFETHADEQAALNIARSWLFLRSQEYKKYQTNKTTGNTDKRAFVETWQSFYRKKLKEVWKPAV

SEQ ID NO: 1184 - protein, 977 aa, synthetic construct
  REGION 1..977: note = CasX variant
QEIKRINKIRRRLVKDSNTKKAGKTGPMKTLLVRVMTPDLRERLENLRKKPENIPQPISNTSRANLNKLLTDYTEMKKAILHVYWEEFQKDPVGLMSRVAQPASKKIDQNKLKPEMDEKGNLTTAGFACSQCGQPLFVYKLEQVSEKGKAYTNYFGRCNVAEHEKLILLAQLKPEKDSDEAVTYSLGKFGQRALDFYSIHVTKESTHPVKPLAQIAGNRYASGPVGKALSDACMGTIASFLSKYQDIIIEHQKVVKGNQKRLESLRELAGKENLEYPSVTLPPQPHTKEGVDAYNEVIARVRMWVNLNLWQKLKLSRDDAKPLLRLKGFPSFPLVERQANEVDWWDMVCNVKKLINEKKEDGKVFWQNLAGYKRQEALRPYLSSEEDRKKGKKFARYQLGDLLLHLEKKHGEDWGKVYDEAWERIDKKVEGLSKHIKLEEERRSEDAQSKAALTDWLRAKASFVIEGLKEADKDEFCRCELKLQKWYGDLRGKPFAIEAENSILDISGFSKQYNCAFIWQKDGVKKLNLYLIINYFKGGKLRFKKIKPEAFEANRFYTVINKKSGEIVPMEVNFNFDDPNLIILPLAFGKRQGREFIWNDLLSLETGSLKLANGRVIEKTLYNRRTRQDEPALFVALTFERREVLDSSNIKPMNLIGVDRGENIPAVIALTDPEGCPLSRFKDSLGNPTHILRIGESYKEKQRTIQAKKEVEQRRAGGYSRKYASKAKNLADDMVRNTARDLLYYAVTQDAMLIFENLSRGFGRQGKRTFMAERQYTRMEDWLTAKLAYEGLPSKTYLSKTAQYTSKTCSNCGFTITSADYDRVLEKLKKTATGWMTTINGKELKVEGQITYYNRYKRQNVVKDLSVELDRLSEESVNNDISSWTKGRSGEALSLLKKRFSHRPVQEKFVCLNCGFETHADEQAALNIARSWLFLRSQEYKKYQTNKTTGNTDKRAFVETWQSFYRKKLKEVWKPAV

SEQ ID NO: 1185 - protein, 979 aa, synthetic construct
  REGION 1..979: note = CasX variant
QEIKRINKIRRRLVKDSNTKKAGKTGPMKTLLVRVMTPDLRERLENLRKKPENIPQPISNTSRANLNKLLTDYTEMKKAILHVYWEEFQKDPVGLMSRVAQPASKKIDQNKLKPEMDEKGNLTTAGFACSQCGQPLFVYKLEQVSEKGKAYTNYFGRCNVAEHEKLILLAQLKPEKDSDEAVTYSLGKFGQRALDFYSIHVTKESTHPVKPLAQIAGNRYASGPVGKALSDACMGTIASFLSKYQDIIIEHQKVVKGNQKRLESLRELAGKENLEYPSVTLPPQPHTKEGVDAYNEVIARVRMWVNLNLWQKLKLSRDDAKPLLRLKGFPSFPLVERQANEVDWWDMVCNVKKLINEKKEDGKVFWQNLAGYKRQEALRPYLSSEEDRKKGKKFARYQLGDLLLHLEKKHGEDWGKVYDEAWERIDKKVEGLSKHIKLEEERRSEDAQSKAALTDWLRAKASFVIEGLKEADKDEFCRCELKLQKWYGDLRGKPFAIEAENSILDISGFSKQYNCAFIWQKDGVKKLNLYLIINYFKGGKLRFKKIKPEAFEANRFYTVINKKSGEIVPMEVNFNFDDPNLIILPLAFGKRQGREFIWNDLLSLETGSLKLANGRVIEKTLYNRRTRQDEPALFVALTFERREVLDSSNIKPMNLIGVDRGENIPAVIALTDPEGCPLSRFKDSLGNPTHILRIGESYKEKQRTIQAKKEVEQRRAGGYSRKYASKAKNLADDMVRNTARDLLYYAVTQDAMLIFENLSRGFGRQGKRTFMAERQYTRMEDWLTAKLAYEGLPSKTYLSKTLAQYTSKTCSNCGFTWITSADYDRVLEKLKKTATGWMTTINGKELKVEGQITYYNRYKRQNVVKDLSVELDRLSEESVNNDISSWTKGRSGEALSLLKKRFSHRPVQEKFVCLNCGFETHADEQAALNIARSWLFLRSQEYKKYQTNKTTGNTDKRAFVETWQSFYRKKLKEVWKPAV

SEQ ID NO: 1186 - protein, 979 aa, synthetic construct
  REGION 1..979: note = CasX variant
QEIKRINKIRRRLVKDSNTKKAGKTGPMKTLLVRVMTPDLRERLENLRKKPENIPQPISNTSRANLNKLLTDYTEMKKAILHVYWEEFQKDPVGLMSRVAQPASKKIDQNKLKPEMDEKGNLTTAGFACSQCGQPLFVYKLEQVSEKGKAYTNYFGRCNVAEHEKLILLAQLKPEKDSDEAVTYSLGKFGQRALDFYSIHVTKESTHPVKPLAQIAGNRYASGPVGKALSDACMGTIASFLSKYQDIIIEHQKVVKGNQKRLESLRELAGKENLEYPSVTLPPQPHTKEGVDAYNEVIARVRMWVNLNLWQKLKLSRDDAKPLLRLKGFPSFPLVERQANEVDWWDMVCNVKKLINEKKEDGKVFWQNLAGYKRQEALRPYLSSEEDRKKGKKFARYQLGDLLLHLEKKHGEDWGKVYDEAWERIDKKVEGLSKHIKLEEERRSEDAQSKAALTDWLRAKASFVIEGLKEADKDEFCRCELKLQKWYGDLRGKPFAIEAENSILDISGFSKQYNCAFIWQKDGVKKLNLYLIINYFKGGKLRFKKIKPEAFEANRFYTVINKKSGEIVPMEVNFNFDDPNLIILPLAFGKRQGREFIWNDLLSLETGSLKLANGRVIEKTLYNRRTRQDEPALFVALTFERREVLDSSNIKPMNLIGVDRGENIPAVIALTDPEGCPLSRFKDSLGNPTHILRIGESYKEKQRTIQAKKEVEQRRAGGYSRKYASKAKNLADDMVRNTARDLLYYAVTQDAMLIFENLSRGFGRQGKRTFMAERQYTRMEDWLTAKLAYEGLPSKTYLSKHTLAQYTSKTCSNCGFTITSADYDRVLEKLKKTATGWMTTINGKELKVEGQITYYNRYKRQNVVKDLSVELDRLSEESVNNDISSWTKGRSGEALSLLKKRFSHRPVQEKFVCLNCGFETHADEQAALNIARSWLFLRSQEYKKYQTNKTTGNTDKRAFVETWQSFYRKKLKEVWKPAV

SEQ ID NO: 1187 - protein, 978 aa, synthetic construct
  REGION 1..978: note = CasX variant
QEIKRINKIRRRLVKDSNTKKAGKTGPMKTLLVRVMTPDLRERLENLRKKPENIPQPISNTSRANLNKLLTDYTEMKKAILHVYWEEFQKDPVGLMSRVAQPASKKIDQNKLKPEMDEKGNLTTAGFACSQCGQPLFVYKLEQVSEKGKAYTNYFGRCNVAEHEKLILLAQLKPEKDSDEAVTYSLGKFGQRALDFYSIHVTKESTHPVKPLAQIAGNRYASGPVGKALSDACMGTIASFLSKYQDIIIEHQKVVKGNQKRLESLRELAGKENLEYPSVTLPPQPHTKEGVDAYNEVIARVRMWVNLNLWQKLKLSRDDAKPLLRLKGFPSFPLVERQANEVDWWDMVCNVKKLINEKKEDGKVFWQNLAGYKRQEALRPYLSSEEDRKKGKKFARYQLGDLLLHLEKKHGEDWGKVYDEAWERIDKKVEGLSKHIKLEEERRSEDAQSKAALTDWLRAKASFVIEGLKEADKDEFCRCELKLQKWYGDLRGKPFAIEAENSILDISGFSKQYNCAFIWQKDGVKKLNLYLIINYFKGGKLRFKKIKPEAFEANRFYTVINKKSGEIVPMEVNFNFDDPNLIILPLAFGKRQGREFIWNDLLSLETGSLKLANGRVIEKTLYNRRTRQDEPALFVALTFERREVLDSSNIKPMNLIGVDRGENIPAVIALTDPEGCPLSRFKDSLGNPTHILRIGESYKEKQRTIQAKKEVEQRRAGGYSRKYASKAKNLADDMVRNTARDLLYYAVTQDAMLIFENLSRGFGRQGKRTFMAERQYTRMEDWLTAKLAYEGLPSKTYLSKTLAQYTSKPCSNCGFTITSADYDRVLEKLKKTATGWMTTINGKELKVEGQITYYNRYKRQNVVKDLSVELDRLSEESVNNDISSWTKGRSGEALSLLKKRFSHRPVQEKFVCLNCGFETHADEQAALNIARSWLFLRSQEYKKYQTNKTTGNTDKRAFVETWQSFYRKKLKEVWKPAV

SEQ ID NO: 1188 - protein, 979 aa, synthetic construct
  REGION 1..979: note = CasX variant
QEIKRINKIRRRLVKDSNTKKAGKTGPMKTLLVRVMTPDLRERLENLRKKPENIPQPISNTSRANLNKLLTDYTEMKKAILHVYWEEFQKDPVGLMSRVAQPASKKIDQNKLKPEMDEKGNLTTAGFACSQCGQPLFVYKLEQVSEKGKAYTNYFGRCNVAEHEKLILLAQLKPEKDSDEAVTYSLGKFGQRALDFYSIHVTKESTHPVKPLAQIAGNRYASGPVGKALSDACMGTIASFLSKYQDIIIEHQKVVKGNQKRLESLRELAGKENLEYPSVTLPPQPHTKEGVDAYNEVIARVRMWVNLNLWQKLKLSRDDAKPLLRLKGFPSFPLVERQANEVDWWDMVCNVKKLINEKKEDGKVFWQNLAGYKRQEALRPYLSSEEDRKKGKKFARYQLGDLLLHLEKKHGEDWGKVYDEAWERIDKKVEGLSKHIKLEEERRSEDAQSKAALTDWLRAKASFVIEGLKEADKDEFCRCELKLQKWYGDLRGKPFAIEAENSILDISGFSKQYNCAFIWQKDGVKKLNLYLIINYFKGGKLRFKKIKPEAFEANRFYTVINKKSGEIVPMEVNFNFDDPNLIILPLAFGKRQGREFIWNDLLSLETGSLKLANGRVIEKTLYNRRTRQDEPALFVALTFERREVLDSSNIKPMNLIGVDRGENIPAVIALTDPEGCPLSRFKDSLGNPTHILRIGESYKEKQRTIQAKKEVEQRRAGGYSRKYASKAKNLADDMVRNTARDLLYYAVTQDAMLIFENLSRGFGRQGKRTFMAERQYTRMEDWLTAKLAYEGLPSKTYLSKTLAAQYTSKTCSNCGFTITSADYDRVLEKLKKTATGWMTTINGKELKVEGQITYYNRYKRQNVVKDLSVELDRLSEESVNNDISSWTKGRSGEALSLLKKRFSHRPVQEKFVCLNCGFETHADEQAALNIARSWLFLRSQEYKKYQTNKTTGNTDKRAFVETWQSFYRKKLKEVWKPAV

SEQ ID NO: 1189 - protein, 979 aa, synthetic construct
  REGION 1..979: note = CasX variant
QEIKRINKIRRRLVKDSNTKKAGKTGPMKTLLVRVMTPDLRERLENLRKKPENIPQPISNTSRANLNKLLTDYTEMKKAILHVYWEEFQKDPVGLMSRVAQPASKKIDQNKLKPEMDEKGNLTTAGFACSQCGQPLFVYKLEQVSEKGKAYTNYFGRCNVAEHEKLILLAQLKPEKDSDEAVTYSLGKFGQRALDFYSIHVTKESTHPVKPLAQIAGNRYASGPVGKALSDACMGTIASFLSKYQDIIIEHQKVVKGNQKRLESLRELAGKENLEYPSVTLPPQPHTKEGVDAYNEVIARVRMWVNLNLWQKLKLSRDDAKPLLRLKGFPSFPLVERQANEVDWWDMVCNVKKLINEKKEDGKVFWQNLAGYKRQEALRPYLSSEEDRKKGKKFARYQLGDLLLHLEKKHGEDWGKVYDEAWERIDKKVEGLSKHIKLEEERRSEDAQSKAALTDWLRAKASFVIEGLKEADKDEFCRCELKLQKWYGDLRGKPFAIEAENSILDISGFSKQYNCAFIWQKDGVKKLNLYLIINYFKGGKLRFKKIKPEAFEANRFYTVINKKSGEIVPMEVNFNFDDPNLIILPLAFGKRQGREFIWNDLLSLETGSLKLANGRVIEKTLYNRRTRQDEPALFVALTFERREVLDSSNIKPMNLIGVDRGENIPAVIALTDPEGCPLSRFKDSLGNPTHILRIGESYKEKQRTIQAKKEVEQRRAGGYSRKYASKAKNLADDMVRNTARDLLYYAVTQDAMLIFENLSRGFGRQGKRTFMAERQYTRMEDWLTAKLAYEGLPSKTYLSKTLAQYTSKTCSNCGGFTITSADYDRVLEKLKKTATGWMTTINGKELKVEGQITYYNRYKRQNVVKDLSVELDRLSEESVNNDISSWTKGRSGEALSLLKKRFSHRPVQEKFVCLNCGFETHADEQAALNIARSWLFLRSQEYKKYQTNKTTGNTDKRAFVETWQSFYRKKLKEVWKPAV

SEQ ID NO: 1190 - protein, 979 aa, synthetic construct
  REGION 1..979: note = CasX variant
QEIKRINKIRRRLVKDSNTKKAGKTGPMKTLLVRVMTPDLRERLENLRKKPENIPQPISNTSRANLNKLLTDYTEMKKAILHVYWEEFQKDPVGLMSRVAQPASKKIDQNKLKPEMDEKGNLTTAGFACSQCGQPLFVYKLEQVSEKGKAYTNYFGRCNVAEHEKLILLAQLKPEKDSDEAVTYSLGKFGQRALDFYSIHVTKESTHPVKPLAQIAGNRYASGPVGKALSDACMGTIASFLSKYQDIIIEHQKVVKGNQKRLESLRELAGKENLEYPSVTLPPQPHTKEGVDAYNEVIARVRMWVNLNLWQKLKLSRDDAKPLLRLKGFPSFPLVERQANEVDWWDMVCNVKKLINEKKEDGKVFWQNLAGYKRQEALRPYLSSEEDRKKGKKFARYQLGDLLLHLEKKHGEDWGKVYDEAWERIDKKVEGLSKHIKLEEERRSEDAQSKAALTDWLRAKASFVIEGLKEADKDEFCRCELKLQKWYGDLRGKPFAIEAENSILDISGFSKQYNCAFIWQKDGVKKLNLYLIINYFKGGKLRFKKIKPEAFEANRFYTVINKKSGEIVPMEVNFNFDDPNLIILPLAFGKRQGREFIWNDLLSLETGSLKLANGRVIEKTLYNRRTRQDEPALFVALTFERREVLDSSNIKPMNLIGVDRGENIPAVIALTDPEGCPLSRFKDSLGNPTHILRIGESYKEKQRTIQAKKEVEQRRAGGYSRKYASKAKNLADDMVRNTARDLLYYAVTQDAMLIFENLSRGFGRQGKRTFMAERQYTRMEDWLTAKLAYEGLPSKTYLSKTLFAQYTSKTCSNCGFTITSADYDRVLEKLKKTATGWMTTINGKELKVEGQITYYNRYKRQNVVKDLSVELDRLSEESVNNDISSWTKGRSGEALSLLKKRFSHRPVQEKFVCLNCGFETHADEQAALNIARSWLFLRSQEYKKYQTNKTTGNTDKRAFVETWQSFYRKKLKEVWKPAV

SEQ ID NO: 1191 - protein, 979 aa, synthetic construct
  REGION 1..979: note = CasX variant
QEIKRINKIRRRLVKDSNTKKAGKTGPMKTLLVRVMTPDLRERLENLRKKPENIPQPISNTSRANLNKLLTDYTEMKKAILHVYWEEFQKDPVGLMSRVAQPASKKIDQNKLKPEMDEKGNLTTAGFACSQCGQPLFVYKLEQVSEKGKAYTNYFGRCNVAEHEKLILLAQLKPEKDSDEAVTYSLGKFGQRALDFYSIHVTKESTHPVKPLAQIAGNRYASGPVGKALSDACMGTIASFLSKYQDIIIEHQKVVKGNQKRLESLRELAGKENLEYPSVTLPPQPHTKEGVDAYNEVIARVRMWVNLNLWQKLKLSRDDAKPLLRLKGFPSFPLVERQANEVDWWDMVCNVKKLINEKKEDGKVFWQNLAGYKRQEALRPYLSSEEDRKKGKKFARYQLGDLLLHLEKKHGEDWGKVYDEAWERIDKKVEGLSKHIKLEEERRSEDAQSKAALTDWLRAKASFVIEGLKEADKDEFCRCELKLQKWYGDLRGKPFAIEAENSILDISGFSKQYNCAFIWQKDGVKKLNLYLIINYFKGGKLRFKKIKPEAFEANRFYTVINKKSGEIVPMEVNFNFDDPNLIILPLAFGKRQGREFIWNDLLSLETGSLKLANGRVIEKTLYNRRTRQDEPALFVALTFERREVLDSSNIKPMNLIGVDRGENIPAVIALTDPEGCPLSRFKDSLGNPTHILRIGESYKEKQRTIQAKKEVEQRRAGGYSRKYASKAKNLADDMVRNTARDLLYYAVTQDAMLIFENLSRGFGRQGKRTFMAERQYTRMEDWLTAKLAYEGLPSKTYLSKTLAQYTSKNTCSNCGFTITSADYDRVLEKLKKTATGWMTTINGKELKVEGQITYYNRYKRQNVVKDLSVELDRLSEESVNNDISSWTKGRSGEALSLLKKRFSHRPVQEKFVCLNCGFETHADEQAALNIARSWLFLRSQEYKKYQTNKTTGNTDKRAFVETWQSFYRKKLKEVWKPAV

SEQ ID NO: 1192 - protein, 978 aa, synthetic construct
  REGION 1..978: note = CasX variant
QEIKRINKIRRRLVKDSNTKKAGKTGPMKTLLVRVMTPDLRERLENLRKKPENIPQPISNTSRANLNKLLTDYTEMKKAILHVYWEEFQKDPVGLMSRVAQPASKKIDQNKLKPEMDEKGNLTTAGFACSQCGQPLFVYKLEQVSEKGKAYTNYFGRCNVAEHEKLILLAQLKPEKDSDEAVTYSLGKFGQRALDFYSIHVTKESTHPVKPLAQIAGNRYASGPVGKALSDACMGTIASFLSKYQDIIIEHQKVVKGNQKRLESLRELAGKENLEYPSVTLPPQPHTKEGVDAYNEVIARVRMWVNLNLWQKLKLSRDDAKPLLRLKGFPSFPLVERQANEVDWWDMVCNVKKLINEKKEDGKVFWQNLAGYKRQEALRPYLSSEEDRKKGKKFARYQLGDLLLHLEKKHGEDWGKVYDEAWERIDKKVEGLSKHIKLEEERRSEDAQSKAALTDWLRAKASFVIEGLKEADKDEFCRCELKLQKWYGDLRGKPFAIEAENSILDISGFSKQYNCAFIWQKDGVKKLNLYLIINYFKGGKLRFKKIKPEAFEANRFYTVINKKSGEIVPMEVNFNFDDPNLIILPLAFGKRQGREFIWNDLLSLETGSLKLANGRVIEKTLYNRRTRQDEPALFVALTFERREVLDSSNIKPMNLIGVDRGENIPAVIALTDPEGCPLSRFKDSLGNPTHILRIGESYKEKQRTIQAKKEVEQRRAGGYSRKYASKAKNLADDMVRNTARDLLYYAVTQDAMLIFENLSRGFGRQGKRTFMAERQYTRMEDWLTAKLAYEGLPSKTYLSKTLAQYTSKTCSNCGPTITSADYDRVLEKLKKTATGWMTTINGKELKVEGQITYYNRYKRQNVVKDLSVELDRLSEESVNNDISSWTKGRSGEALSLLKKRFSHRPVQEKFVCLNCGFETHADEQAALNIARSWLFLRSQEYKKYQTNKTTGNTDKRAFVETWQSFYRKKLKEVWKPAV

SEQ ID NO: 1193 - protein, 979 aa, synthetic construct
  REGION 1..979: note = CasX variant
QEIKRINKIRRRLVKDSNTKKAGKTGPMKTLLVRVMTPDLRERLENLRKKPENIPQPISNTSRANLNKLLTDYTEMKKAILHVYWEEFQKDPVGLMSRVAQPASKKIDQNKLKPEMDEKGNLTTAGFACSQCGQPLFVYKLEQVSEKGKAYTNYFGRCNVAEHEKLILLAQLKPEKDSDEAVTYSLGKFGQRALDFYSIHVTKESTHPVKPLAQIAGNRYASGPVGKALSDACMGTIASFLSKYQDIIIEHQKVVKGNQKRLESLRELAGKENLEYPSVTLPPQPHTKEGVDAYNEVIARVRMWVNLNLWQKLKLSRDDAKPLLRLKGFPSFPLVERQANEVDWWDMVCNVKKLINEKKEDGKVFWQNLAGYKRQEALRPYLSSEEDRKKGKKFARYQLGDLLLHLEKKHGEDWGKVYDEAWERIDKKVEGLSKHIKLEEERRSEDAQSKAALTDWLRAKASFVIEGLKEADKDEFCRCELKLQKWYGDLRGKPFAIEAENSILDISGFSKQYNCAFIWQKDGVKKLNLYLIINYFKGGKLRFKKIKPEAFEANRFYTVINKKSGEIVPMEVNFNFDDPNLIILPLAFGKRQGREFIWNDLLSLETGSLKLANGRVIEKTLYNRRTRQDEPALFVALTFERREVLDSSNIKPMNLIGVDRGENIPAVIALTDPEGCPLSRFKDSLGNPTHILRIGESYKEKQRTIQAKKEVEQRRAGGYSRKYASKAKNLADDMVRNTARDLLYYAVTQDAMLIFENLSRGFGRQGKRTFMAERQYTRMEDWLTAKLAYEGLPSKTYLSKTWLAQYTSKTCSNCGFTITSADYDRVLEKLKKTATGWMTTINGKELKVEGQITYYNRYKRQNVVKDLSVELDRLSEESVNNDISSWTKGRSGEALSLLKKRFSHRPVQEKFVCLNCGFETHADEQAALNIARSWLFLRSQEYKKYQTNKTTGNTDKRAFVETWQSFYRKKLKEVWKPAV

SEQ ID NO: 1194 - protein, 978 aa, synthetic construct
  REGION 1..978: note = CasX variant
QEIKRINKIRRRLVKDSNTKKAGKTGPMKTLLVRVMTPDLRERLENLRKKPENIPQPISNTSRANLNKLLTDYTEMKKAILHVYWEEFQKDPVGLMSRVAQPASKKIDQNKLKPEMDEKGNLTTAGFACSQCGQPLFVYKLEQVSEKGKAYTNYFGRCNVAEHEKLILLAQLKPEKDSDEAVTYSLGKFGQRALDFYSIHVTKESTHPVKPLAQIAGNRYASGPVGKALSDACMGTIASFLSKYQDIIIEHQKVVKGNQKRLESLRELAGKENLEYPSVTLPPQPHTKEGVDAYNEVIARVRMWVNLNLWQKLKLSRDDAKPLLRLKGFPSFPLVERQANEVDWWDMVCNVKKLINEKKEDGKVFWQNLAGYKRQEALRPYLSSEEDRKKGKKFARYQLGDLLLHLEKKHGEDWGKVYDEAWERIDKKVEGLSKHIKLEEERRSEDAQSKAALTDWLRAKASFVIEGLKEADKDEFCRCELKLQKWYGDLRGKPFAIEAENSILDISGFSKQYNCAFIWQKDGVKKLNLYLIINYFKGGKLRFKKIKPEAFEANRFYTVINKKSGEIVPMEVNFNFDDPNLIILPLAFGKRQGREFIWNDLLSLETGSLKLANGRVIEKTLYNRRTRQDEPALFVALTFERREVLDSSNIKPMNLIGVDRGENIPAVIALTDPEGCPLSRFKDSLGNPTHILRIGESYKEKQRTIQAKKEVEQRRAGGYSRKYASKAKNLADDMVRNTARDLLYYAVTQDAMLIFENLSRGFGRQGKRTFMAERQYTRMEDWLTAKLAYEGLPSKTYLSKTLAQYTSKTMSNCGFTITSADYDRVLEKLKKTATGWMTTINGKELKVEGQITYYNRYKRQNVVKDLSVELDRLSEESVNNDISSWTKGRSGEALSLLKKRFSHRPVQEKFVCLNCGFETHADEQAALNIARSWLFLRSQEYKKYQTNKTTGNTDKRAFVETWQSFYRKKLKEVWKPAV

SEQ ID NO: 1195 - protein, 977 aa, synthetic construct
  REGION 1..977: note = CasX variant
QEIKRINKIRRRLVKDSNTKKAGKTGPMKTLLVRVMTPDLRERLENLRKKPENIPQPISNTSRANLNKLLTDYTEMKKAILHVYWEEFQKDPVGLMSRVAQPASKKIDQNKLKPEMDEKGNLTTAGFACSQCGQPLFVYKLEQVSEKGKAYTNYFGRCNVAEHEKLILLAQLKPEKDSDEAVTYSLGKFGQRALDFYSIHVTKESTHPVKPLAQIAGNRYASGPVGKALSDACMGTIASFLSKYQDIIIEHQKVVKGNQKRLESLRELAGKENLEYPSVTLPPQPHTKEGVDAYNEVIARVRMWVNLNLWQKLKLSRDDAKPLLRLKGFPSFPLVERQANEVDWWDMVCNVKKLINEKKEDGKVFWQNLAGYKRQEALRPYLSSEEDRKKGKKFARYQLGDLLLHLEKKHGEDWGKVYDEAWERIDKKVEGLSKHIKLEEERRSEDAQSKAALTDWLRAKASFVIEGLKEADKDEFCRCELKLQKWYGDLRGKPFAIEAENSILDISGFSKQYNCAFIWQKDGVKKLNLYLIINYFKGGKLRFKKIKPEAFEANRFYTVINKKSGEIVPMEVNFNFDDPNLIILPLAFGKRQGREFIWNDLLSLETGSLKLANGRVIEKTLYNRRTRQDEPALFVALTFERREVLDSSNIKPMNLIGVDRGENIPAVIALTDPEGCPLSRFKDSLGNPTHILRIGESYKEKQRTIQAKKEVEQRRAGGYSRKYASKAKNLADDMVRNTARDLLYYAVTQDAMLIFENLSRGFGRQGKRTFMAERQYTRMEDWLTAKLAYEGLPSKTYLSKTLAQYTSKTCSCGFTITSADYDRVLEKLKKTATGWMTTINGKELKVEGQITYYNRYKRQNVVKDLSVELDRLSEESVNNDISSWTKGRSGEALSLLKKRFSHRPVQEKFVCLNCGFETHADEQAALNIARSWLFLRSQEYKKYQTNKTTGNTDKRAFVETWQSFYRKKLKEVWKPAV

SEQ ID NO: 1196 - protein, 979 aa, synthetic construct
  REGION 1..979: note = CasX variant
QEIKRINKIRRRLVKDSNTKKAGKTGPMKTLLVRVMTPDLRERLENLRKKPENIPQPISNTSRANLNKLLTDYTEMKKAILHVYWEEFQKDPVGLMSRVAQPASKKIDQNKLKPEMDEKGNLTTAGFACSQCGQPLFVYKLEQVSEKGKAYTNYFGRCNVAEHEKLILLAQLKPEKDSDEAVTYSLGKFGQRALDFYSIHVTKESTHPVKPLAQIAGNRYASGPVGKALSDACMGTIASFLSKYQDIIIEHQKVVKGNQKRLESLRELAGKENLEYPSVTLPPQPHTKEGVDAYNEVIARVRMWVNLNLWQKLKLSRDDAKPLLRLKGFPSFPLVERQANEVDWWDMVCNVKKLINEKKEDGKVFWQNLAGYKRQEALRPYLSSEEDRKKGKKFARYQLGDLLLHLEKKHGEDWGKVYDEAWERIDKKVEGLSKHIKLEEERRSEDAQSKAALTDWLRAKASFVIEGLKEADKDEFCRCELKLQKWYGDLRGKPFAIEAENSILDISGFSKQYNCAFIWQKDGVKKLNLYLIINYFKGGKLRFKKIKPEAFEANRFYTVINKKSGEIVPMEVNFNFDDPNLIILPLAFGKRQGREFIWNDLLSLETGSLKLANGRVIEKTLYNRRTRQDEPALFVALTFERREVLDSSNIKPMNLIGVDRGENIPAVIALTDPEGCPLSRFKDSLGNPTHILRIGESYKEKQRTIQAKKEVEQRRAGGYSRKYASKAKNLADDMVRNTARDLLYYAVTQDAMLIFENLSRGFGRQGKRTFMAERQYTRMEDWLTAKLAYEGLPSKTYLSKTLAQYTSKTCSVNCGFTITSADYDRVLEKLKKTATGWMTTINGKELKVEGQITYYNRYKRQNVVKDLSVELDRLSEESVNNDISSWTKGRSGEALSLLKKRFSHRPVQEKFVCLNCGFETHADEQAALNIARSWLFLRSQEYKKYQTNKTTGNTDKRAFVETWQSFYRKKLKEVWKPAV

SEQ ID NO: 1197 - protein, 978 aa, synthetic construct
  REGION 1..978: note = CasX variant
QEIKRINKIRRRLVKDSNTKKAGKTGPMKTLLVRVMTPDLRERLENLRKKPENIPQPISNTSRANLNKLLTDYTEMKKAILHVYWEEFQKDPVGLMSRVAQPASKKIDQNKLKPEMDEKGNLTTAGFACSQCGQPLFVYKLEQVSEKGKAYTNYFGRCNVAEHEKLILLAQLKPEKDSDEAVTYSLGKFGQRALDFYSIHVTKESTHPVKPLAQIAGNRYASGPVGKALSDACMGTIASFLSKYQDIIIEHQKVVKGNQKRLESLRELAGKENLEYPSVTLPPQPHTKEGVDAYNEVIARVRMWVNLNLWQKLKLSRDDAKPLLRLKGFPSFPLVERQANEVDWWDMVCNVKKLINEKKEDGKVFWQNLAGYKRQEALRPYLSSEEDRKKGKKFARYQLGDLLLHLEKKHGEDWGKVYDEAWERIDKKVEGLSKHIKLEEERRSEDAQSKAALTDWLRAKASFVIEGLKEADKDEFCRCELKLQKWYGDLRGKPFAIEAENSILDISGFSKQYNCAFIWQKDGVKKLNLYLIINYFKGGKLRFKKIKPEAFEANRFYTVINKKSGEIVPMEVNFNFDDPNLIILPLAFGKRQGREFIWNDLLSLETGSLKLANGRVIEKTLYNRRTRQDEPALFVALTFERREVLDSSNIKPMNLIGVDRGENIPAVIALTDPEGCPLSRFKDSLGNPTHILRIGESYKEKQRTIQAKKEVEQRRAGGYSRKYASKAKNLADDMVRNTARDLLYYAVTQDAMLIFENLSRGFGRQGKRTFMAERQYTRMEDWLTAKLAYEGLPSKTYLSKTLAQYTPKTCSNCGFTITSADYDRVLEKLKKTATGWMTTINGKELKVEGQITYYNRYKRQNVVKDLSVELDRLSEESVNNDISSWTKGRSGEALSLLKKRFSHRPVQEKFVCLNCGFETHADEQAALNIARSWLFLRSQEYKKYQTNKTTGNTDKRAFVETWQSFYRKKLKEVWKPAV

SEQ ID NO: 1198 - protein, 979 aa, synthetic construct
  REGION 1..979: note = CasX variant
QEIKRINKIRRRLVKDSNTKKAGKTGPMKTLLVRVMTPDLRERLENLRKKPENIPQPISNTSRANLNKLLTDYTEMKKAILHVYWEEFQKDPVGLMSRVAQPASKKIDQNKLKPEMDEKGNLTTAGFACSQCGQPLFVYKLEQVSEKGKAYTNYFGRCNVAEHEKLILLAQLKPEKDSDEAVTYSLGKFGQRALDFYSIHVTKESTHPVKPLAQIAGNRYASGPVGKALSDACMGTIASFLSKYQDIIIEHQKVVKGNQKRLESLRELAGKENLEYPSVTLPPQPHTKEGVDAYNEVIARVRMWVNLNLWQKLKLSRDDAKPLLRLKGFPSFPLVERQANEVDWWDMVCNVKKLINEKKEDGKVFWQNLAGYKRQEALRPYLSSEEDRKKGKKFARYQLGDLLLHLEKKHGEDWGKVYDEAWERIDKKVEGLSKHIKLEEERRSEDAQSKAALTDWLRAKASFVIEGLKEADKDEFCRCELKLQKWYGDLRGKPFAIEAENSILDISGFSKQYNCAFIWQKDGVKKLNLYLIINYFKGGKLRFKKIKPEAFEANRFYTVINKKSGEIVPMEVNFNFDDPNLIILPLAFGKRQGREFIWNDLLSLETGSLKLANGRVIEKTLYNRRTRQDEPALFVALTFERREVLDSSNIKPMNLIGVDRGENIPAVIALTDPEGCPLSRFKDSLGNPTHILRIGESYKEKQRTIQAKKEVEQRRAGGYSRKYASKAKNLADDMVRNTARDLLYYAVTQDAMLIFENLSRGFGRQGKRTFMAERQYTRMEDWPLTAKLAYEGLPSKTYLSKTLAQYTSKTCSNCGFTITSADYDRVLEKLKKTATGWMTTINGKELKVEGQITYYNRYKRQNVVKDLSVELDRLSEESVNNDISSWTKGRSGEALSLLKKRFSHRPVQEKFVCLNCGFETHADEQAALNIARSWLFLRSQEYKKYQTNKTTGNTDKRAFVETWQSFYRKKLKEVWKPAV

SEQ ID NO: 1199 - protein, 979 aa, synthetic construct
  REGION 1..979: note = CasX variant
QEIKRINKIRRRLVKDSNTKKAGKTGPMKTLLVRVMTPDLRERLENLRKKPENIPQPISNTSRANLNKLLTDYTEMKKAILHVYWEEFQKDPVGLMSRVAQPASKKIDQNKLKPEMDEKGNLTTAGFACSQCGQPLFVYKLEQVSEKGKAYTNYFGRCNVAEHEKLILLAQLKPEKDSDEAVTYSLGKFGQRALDFYSIHVTKESTHPVKPLAQIAGNRYASGPVGKALSDACMGTIASFLSKYQDIIIEHQKVVKGNQKRLESLRELAGKENLEYPSVTLPPQPHTKEGVDAYNEVIARVRMWVNLNLWQKLKLSRDDAKPLLRLKGFPSFPLVERQANEVDWWDMVCNVKKLINEKKEDGKVFWQNLAGYKRQEALRPYLSSEEDRKKGKKFARYQLGDLLLHLEKKHGEDWGKVYDEAWERIDKKVEGLSKHIKLEEERRSEDAQSKAALTDWLRAKASFVIEGLKEADKDEFCRCELKLQKWYGDLRGKPFAIEAENSILDISGFSKQYNCAFIWQKDGVKKLNLYLIINYFKGGKLRFKKIKPEAFEANRFYTVINKKSGEIVPMEVNFNFDDPNLIILPLAFGKRQGREFIWNDLLSLETGSLKLANGRVIEKTLYNRRTRQDEPALFVALTFERREVLDSSNIKPMNLIGVDRGENIPAVIALTDPEGCPLSRFKDSLGNPTHILRIGESYKEKQRTIQAKKEVEQRRAGGYSRKYASKAKNLADDMVRNTARDLLYYAVTQDAMLIFENLSRGFGRQGKRTFMAERQYTRMEDWLTAKLAYEGLPSKTYLSKTLAQYTSKTCMSNCGFTITSADYDRVLEKLKKTATGWMTTINGKELKVEGQITYYNRYKRQNVVKDLSVELDRLSEESVNNDISSWTKGRSGEALSLLKKRFSHRPVQEKFVCLNCGFETHADEQAALNIARSWLFLRSQEYKKYQTNKTTGNTDKRAFVETWQSFYRKKLKEVWKPAV

SEQ ID NO: 1200 - protein, 979 aa, synthetic construct
  REGION 1..979: note = CasX variant
QEIKRINKIRRRLVKDSNTKKAGKTGPMKTLLVRVMTPDLRERLENLRKKPENIPQPISNTSRANLNKLLTDYTEMKKAILHVYWEEFQKDPVGLMSRVAQPASKKIDQNKLKPEMDEKGNLTTAGFACSQCGQPLFVYKLEQVSEKGKAYTNYFGRCNVAEHEKLILLAQLKPEKDSDEAVTYSLGKFGQRALDFYSIHVTKESTHPVKPLAQIAGNRYASGPVGKALSDACMGTIASFLSKYQDIIIEHQKVVKGNQKRLESLRELAGKENLEYPSVTLPPQPHTKEGVDAYNEVIARVRMWVNLNLWQKLKLSRDDAKPLLRLKGFPSFPLVERQANEVDWWDMVCNVKKLINEKKEDGKVFWQNLAGYKRQEALRPYLSSEEDRKKGKKFARYQLGDLLLHLEKKHGEDWGKVYDEAWERIDKKVEGLSKHIKLEEERRSEDAQSKAALTDWLRAKASFVIEGLKEADKDEFCRCELKLQKWYGDLRGKPFAIEAENSILDISGFSKQYNCAFIWQKDGVKKLNLYLIINYFKGGKLRFKKIKPEAFEANRFYTVINKKSGEIVPMEVNFNFDDPNLIILPLAFGKRQGREFIWNDLLSLETGSLKLANGRVIEKTLYNRRTRQDEPALFVALTFERREVLDSSNIKPMNLIGVDRGENIPAVIALTDPEGCPLSRFKDSLGNPTHILRIGESYKEKQRTIQAKKEVEQRRAGGYSRKYASKAKNLADDMVRNTARDLLYYAVTQDAMLIFENLSRGFGRQGKRTFMAERQYTRMEDWLTAKLARYEGLPSKTYLSKTLAQYTSKTCSNCGFTITSADYDRVLEKLKKTATGWMTTINGKELKVEGQITYYNRYKRQNVVKDLSVELDRLSEESVNNDISSWTKGRSGEALSLLKKRFSHRPVQEKFVCLNCGFETHADEQAALNIARSWLFLRSQEYKKYQTNKTTGNTDKRAFVETWQSFYRKKLKEVWKPAV

SEQ ID NO: 1201 - protein, 978 aa, synthetic construct
  REGION 1..978: note = CasX variant
QEIKRINKIRRRLVKDSNTKKAGKTGPMKTLLVRVMTPDLRERLENLRKKPENIPQPISNTSRANLNKLLTDYTEMKKAILHVYWEEFQKDPVGLMSRVAQPASKKIDQNKLKPEMDEKGNLTTAGFACSQCGQPLFVYKLEQVSEKGKAYTNYFGRCNVAEHEKLILLAQLKPEKDSDEAVTYSLGKFGQRALDFYSIHVTKESTHPVKPLAQIAGNRYASGPVGKALSDACMGTIASFLSKYQDIIIEHQKVVKGNQKRLESLRELAGKENLEYPSVTLPPQPHTKEGVDAYNEVIARVRMWVNLNLWQKLKLSRDDAKPLLRLKGFPSFPLVERQANEVDWWDMVCNVKKLINEKKEDGKVFWQNLAGYKRQEALRPYLSSEEDRKKGKKFARYQLGDLLLHLEKKHGEDWGKVYDEAWERIDKKVEGLSKHIKLEEERRSEDAQSKAALTDWLRAKASFVIEGLKEADKDEFCRCELKLQKWYGDLRGKPFAIEAENSILDISGFSKQYNCAFIWQKDGVKKLNLYLIINYFKGGKLRFKKIKPEAFEANRFYTVINKKSGEIVPMEVNFNFDDPNLIILPLAFGKRQGREFIWNDLLSLETGSLKLANGRVIEKTLYNRRTRQDEPALFVALTFERREVLDSSNIKPMNLIGVDRGENIPAVIALTDPEGCPLSRFKDSLGNPTHILRIGESYKEKQRTIQAKKEVEQRRAGGYSRKYASKAKNLADDMVRNTARDLLYYAVTQDAMLIFENLSRGFGRQGKRTFMAERQYTRMEDWLTAKLAYEGLPSKTYLSKTLAQYFSKTCSNCGFTITSADYDRVLEKLKKTATGWMTTINGKELKVEGQITYYNRYKRQNVVKDLSVELDRLSEESVNNDISSWTKGRSGEALSLLKKRFSHRPVQEKFVCLNCGFETHADEQAALNIARSWLFLRSQEYKKYQTNKTTGNTDKRAFVETWQSFYRKKLKEVWKPAV

SEQ ID NO: 1202 - protein, 977 aa, synthetic construct
  REGION 1..977: note = CasX variant
QEIKRINKIRRRLVKDSNTKKAGKTGPMKTLLVRVMTPDLRERLENLRKKPENIPQPISNTSRANLNKLLTDYTEMKKAILHVYWEEFQKDPVGLMSRVAQPASKKIDQNKLKPEMDEKGNLTTAGFACSQCGQPLFVYKLEQVSEKGKAYTNYFGRCNVAEHEKLILLAQLKPEKDSDEAVTYSLGKFGQRALDFYSIHVTKESTHPVKPLAQIAGNRYASGPVGKALSDACMGTIASFLSKYQDIIIEHQKVVKGNQKRLESLRELAGKENLEYPSVTLPPQPHTKEGVDAYNEVIARVRMWVNLNLWQKLKLSRDDAKPLLRLKGFPSFPLVERQANEVDWWDMVCNVKKLINEKKEDGKVFWQNLAGYKRQEALRPYLSSEEDRKKGKKFARYQLGDLLLHLEKKHGEDWGKVYDEAWERIDKKVEGLSKHIKLEEERRSEDAQSKAALTDWLRAKASFVIEGLKEADKDEFCRCELKLQKWYGDLRGKPFAIEAENSILDISGFSKQYNCAFIWQKDGVKKLNLYLIINYFKGGKLRFKKIKPEAFEANRFYTVINKKSGEIVPMEVNFNFDDPNLIILPLAFGKRQGREFIWNDLLSLETGSLKLANGRVIEKTLYNRRTRQDEPALFVALTFERREVLDSSNIKPMNLIGVDRGENIPAVIALTDPEGCPLSRFKDSLGNPTHILRIGESYKEKQRTIQAKKEVEQRRAGGYSRKYASKAKNLADDMVRNTARDLLYYAVTQDAMLIFENLSRGFGRQGKRTFMAERQYTRMEDWLTAKAYEGLPSKTYLSKTLAQYTSKTCSNCGFTITSADYDRVLEKLKKTATGWMTTINGKELKVEGQITYYNRYKRQNVVKDLSVELDRLSEESVNNDISSWTKGRSGEALSLLKKRFSHRPVQEKFVCLNCGFETHADEQAALNIARSWLFLRSQEYKKYQTNKTTGNTDKRAFVETWQSFYRKKLKEVWKPAV

SEQ ID NO: 1203 - protein, 978 aa, synthetic construct
  REGION 1..978: note = CasX variant
QEIKRINKIRRRLVKDSNTKKAGKTGPMKTLLVRVMTPDLRERLENLRKKPENIPQPISNTSRANLNKLLTDYTEMKKAILHVYWEEFQKDPVGLMSRVAQPASKKIDQNKLKPEMDEKGNLTTAGFACSQCGQPLFVYKLEQVSEKGKAYTNYFGRCNVAEHEKLILLAQLKPEKDSDEAVTYSLGKFGQRALDFYSIHVTKESTHPVKPLAQIAGNRYASGPVGKALSDACMGTIASFLSKYQDIIIEHQKVVKGNQKRLESLRELAGKENLEYPSVTLPPQPHTKEGVDAYNEVIARVRMWVNLNLWQKLKLSRDDAKPLLRLKGFPSFPLVERQANEVDWWDMVCNVKKLINEKKEDGKVFWQNLAGYKRQEALRPYLSSEEDRKKGKKFARYQLGDLLLHLEKKHGEDWGKVYDEAWERIDKKVEGLSKHIKLEEERRSEDAQSKAALTDWLRAKASFVIEGLKEADKDEFCRCELKLQKWYGDLRGKPFAIEAENSILDISGFSKQYNCAFIWQKDGVKKLNLYLIINYFKGGKLRFKKIKPEAFEANRFYTVINKKSGEIVPMEVNFNFDDPNLIILPLAFGKRQGREFIWNDLLSLETGSLKLANGRVIEKTLYNRRTRQDEPALFVALTFERREVLDSSNIKPMNLIGVDRGENIPAVIALTDPEGCPLSRFKDSLGNPTHILRIGESYKEKQRTIQAKKEVEQRRAGGYSRKYASKAKNLADDMVRNTARDLLYYAVTQDAMLIFENLSRGFGRQGKRTFMAERQYTRMEDWLTAKLAYEGLPSQTYLSKTLAQYTSKTCSNCGFTITSADYDRVLEKLKKTATGWMTTINGKELKVEGQITYYNRYKRQNVVKDLSVELDRLSEESVNNDISSWTKGRSGEALSLLKKRFSHRPVQEKFVCLNCGFETHADEQAALNIARSWLFLRSQEYKKYQTNKTTGNTDKRAFVETWQSFYRKKLKEVWKPAV

SEQ ID NO: 1204 - protein, 978 aa, synthetic construct
  REGION 1..978: note = CasX variant
QEIKRINKIRRRLVKDSNTKKAGKTGPMKTLLVRVMTPDLRERLENLRKKPENIPQPISNTSRANLNKLLTDYTEMKKAILHVYWEEFQKDPVGLMSRVAQPASKKIDQNKLKPEMDEKGNLTTAGFACSQCGQPLFVYKLEQVSEKGKAYTNYFGRCNVAEHEKLILLAQLKPEKDSDEAVTYSLGKFGQRALDFYSIHVTKESTHPVKPLAQIAGNRYASGPVGKALSDACMGTIASFLSKYQDIIIEHQKVVKGNQKRLESLRELAGKENLEYPSVTLPPQPHTKEGVDAYNEVIARVRMWVNLNLWQKLKLSRDDAKPLLRLKGFPSFPLVERQANEVDWWDMVCNVKKLINEKKEDGKVFWQNLAGYKRQEALRPYLSSEEDRKKGKKFARYQLGDLLLHLEKKHGEDWGKVYDEAWERIDKKVEGLSKHIKLEEERRSEDAQSKAALTDWLRAKASFVIEGLKEADKDEFCRCELKLQKWYGDLRGKPFAIEAENSILDISGFSKQYNCAFIWQKDGVKKLNLYLIINYFKGGKLRFKKIKPEAFEANRFYTVINKKSGEIVPMEVNFNFDDPNLIILPLAFGKRQGREFIWNDLLSLETGSLKLANGRVIEKTLYNRRTRQDEPALFVALTFERREVLDSSNIKPMNLIGVDRGENIPAVIALTDPEGCPLSRFKDSLGNPTHILRIGESYKEKQRTIQAKKEVEQRRAGGYSRKYASKAKNLADDMVRNTARDLLYYAVTQDAMLIFENLSRGFGRQGKRTFMAERQYTRMEDWLTAKLAYNGLPSKTYLSKTLAQYTSKTCSNCGFTITSADYDRVLEKLKKTATGWMTTINGKELKVEGQITYYNRYKRQNVVKDLSVELDRLSEESVNNDISSWTKGRSGEALSLLKKRFSHRPVQEKFVCLNCGFETHADEQAALNIARSWLFLRSQEYKKYQTNKTTGNTDKRAFVETWQSFYRKKLKEVWKPAV

SEQ ID NO: 1205 - protein, 979 aa, synthetic construct
  REGION 1..979: note = CasX variant
QEIKRINKIRRRLVKDSNTKKAGKTGPMKTLLVRVMTPDLRERLENLRKKPENIPQPISNTSRANLNKLLTDYTEMKKAILHVYWEEFQKDPVGLMSRVAQPASKKIDQNKLKPEMDEKGNLTTAGFACSQCGQPLFVYKLEQVSEKGKAYTNYFGRCNVAEHEKLILLAQLKPEKDSDEAVTYSLGKFGQRALDFYSIHVTKESTHPVKPLAQIAGNRYASGPVGKALSDACMGTIASFLSKYQDIIIEHQKVVKGNQKRLESLRELAGKENLEYPSVTLPPQPHTKEGVDAYNEVIARVRMWVNLNLWQKLKLSRDDAKPLLRLKGFPSFPLVERQANEVDWWDMVCNVKKLINEKKEDGKVFWQNLAGYKRQEALRPYLSSEEDRKKGKKFARYQLGDLLLHLEKKHGEDWGKVYDEAWERIDKKVEGLSKHIKLEEERRSEDAQSKAALTDWLRAKASFVIEGLKEADKDEFCRCELKLQKWYGDLRGKPFAIEAENSILDISGFSKQYNCAFIWQKDGVKKLNLYLIINYFKGGKLRFKKIKPEAFEANRFYTVINKKSGEIVPMEVNFNFDDPNLIILPLAFGKRQGREFIWNDLLSLETGSLKLANGRVIEKTLYNRRTRQDEPALFVALTFERREVLDSSNIKPMNLIGVDRGENIPAVIALTDPEGCPLSRFKDSLGNPTHILRIGESYKEKQRTIQAKKEVEQRRAGGYSRKYASKAKNLADDMVRNTARDLLYYAVTQDAMLIFENLSRGFGRQGKRTFMAERQYTRMEDWLTAKLAYEGLPSKTYLHSKTLAQYTSKTCSNCGFTITSADYDRVLEKLKKTATGWMTTINGKELKVEGQITYYNRYKRQNVVKDLSVELDRLSEESVNNDISSWTKGRSGEALSLLKKRFSHRPVQEKFVCLNCGFETHADEQAALNIARSWLFLRSQEYKKYQTNKTTGNTDKRAFVETWQSFYRKKLKEVWKPAV

SEQ ID NO: 1206 - protein, 978 aa, synthetic construct
  REGION 1..978: note = CasX variant
QEIKRINKIRRRLVKDSNTKKAGKTGPMKTLLVRVMTPDLRERLENLRKKPENIPQPISNTSRANLNKLLTDYTEMKKAILHVYWEEFQKDPVGLMSRVAQPASKKIDQNKLKPEMDEKGNLTTAGFACSQCGQPLFVYKLEQVSEKGKAYTNYFGRCNVAEHEKLILLAQLKPEKDSDEAVTYSLGKFGQRALDFYSIHVTKESTHPVKPLAQIAGNRYASGPVGKALSDACMGTIASFLSKYQDIIIEHQKVVKGNQKRLESLRELAGKENLEYPSVTLPPQPHTKEGVDAYNEVIARVRMWVNLNLWQKLKLSRDDAKPLLRLKGFPSFPLVERQANEVDWWDMVCNVKKLINEKKEDGKVFWQNLAGYKRQEALRPYLSSEEDRKKGKKFARYQLGDLLLHLEKKHGEDWGKVYDEAWERIDKKVEGLSKHIKLEEERRSEDAQSKAALTDWLRAKASFVIEGLKEADKDEFCRCELKLQKWYGDLRGKPFAIEAENSILDISGFSKQYNCAFIWQKDGVKKLNLYLIINYFKGGKLRFKKIKPEAFEANRFYTVINKKSGEIVPMEVNFNFDDPNLIILPLAFGKRQGREFIWNDLLSLETGSLKLANGRVIEKTLYNRRTRQDEPALFVALTFERREVLDSSNIKPMNLIGVDRGENIPAVIALTDPEGCPLSRFKDSLGNPTHILRIGESYKEKQRTIQAKKEVEQRRAGGYSRKYASKAKNLADDMVRNTARDLLYYAVTQDAMLIFENLSRGFGRQGKRTFMAERQYTRMEDWLTAKLAYEGLPSKVYLSKTLAQYTSKTCSNCGFTITSADYDRVLEKLKKTATGWMTTINGKELKVEGQITYYNRYKRQNVVKDLSVELDRLSEESVNNDISSWTKGRSGEALSLLKKRFSHRPVQEKFVCLNCGFETHADEQAALNIARSWLFLRSQEYKKYQTNKTTGNTDKRAFVETWQSFYRKKLKEVWKPAV

SEQ ID NO: 1207 - protein, 979 aa, synthetic construct
  REGION 1..979: note = CasX variant
QEIKRINKIRRRLVKDSNTKKAGKTGPMKTLLVRVMTPDLRERLENLRKKPENIPQPISNTSRANLNKLLTDYTEMKKAILHVYWEEFQKDPVGLMSRVAQPASKKIDQNKLKPEMDEKGNLTTAGFACSQCGQPLFVYKLEQVSEKGKAYTNYFGRCNVAEHEKLILLAQLKPEKDSDEAVTYSLGKFGQRALDFYSIHVTKESTHPVKPLAQIAGNRYASGPVGKALSDACMGTIASFLSKYQDIIIEHQKVVKGNQKRLESLRELAGKENLEYPSVTLPPQPHTKEGVDAYNEVIARVRMWVNLNLWQKLKLSRDDAKPLLRLKGFPSFPLVERQANEVDWWDMVCNVKKLINEKKEDGKVFWQNLAGYKRQEALRPYLSSEEDRKKGKKFARYQLGDLLLHLEKKHGEDWGKVYDEAWERIDKKVEGLSKHIKLEEERRSEDAQSKAALTDWLRAKASFVIEGLKEADKDEFCRCELKLQKWYGDLRGKPFAIEAENSILDISGFSKQYNCAFIWQKDGVKKLNLYLIINYFKGGKLRFKKIKPEAFEANRFYTVINKKSGEIVPMEVNFNFDDPNLIILPLAFGKRQGREFIWNDLLSLETGSLKLANGRVIEKTLYNRRTRQDEPALFVALTFERREVLDSSNIKPMNLIGVDRGENIPAVIALTDPEGCPLSRFKDSLGNPTHILRIGESYKEKQRTIQAKKEVEQRRAGGYSRKYASKAKNLADDMVRNTARDLLYYAVTQDAMLIFENLSRGFGRQGKRTFMAERQYTRMEDWLTAKLQAYEGLPSKTYLSKTLAQYTSKTCSNCGFTITSADYDRVLEKLKKTATGWMTTINGKELKVEGQITYYNRYKRQNVVKDLSVELDRLSEESVNNDISSWTKGRSGEALSLLKKRFSHRPVQEKFVCLNCGFETHADEQAALNIARSWLFLRSQEYKKYQTNKTTGNTDKRAFVETWQSFYRKKLKEVWKPAV

SEQ ID NO: 1208 - protein, 979 aa, synthetic construct
  REGION 1..979: note = CasX variant
QEIKRINKIRRRLVKDSNTKKAGKTGPMKTLLVRVMTPDLRERLENLRKKPENIPQPISNTSRANLNKLLTDYTEMKKAILHVYWEEFQKDPVGLMSRVAQPASKKIDQNKLKPEMDEKGNLTTAGFACSQCGQPLFVYKLEQVSEKGKAYTNYFGRCNVAEHEKLILLAQLKPEKDSDEAVTYSLGKFGQRALDFYSIHVTKESTHPVKPLAQIAGNRYASGPVGKALSDACMGTIASFLSKYQDIIIEHQKVVKGNQKRLESLRELAGKENLEYPSVTLPPQPHTKEGVDAYNEVIARVRMWVNLNLWQKLKLSRDDAKPLLRLKGFPSFPLVERQANEVDWWDMVCNVKKLINEKKEDGKVFWQNLAGYKRQEALRPYLSSEEDRKKGKKFARYQLGDLLLHLEKKHGEDWGKVYDEAWERIDKKVEGLSKHIKLEEERRSEDAQSKAALTDWLRAKASFVIEGLKEADKDEFCRCELKLQKWYGDLRGKPFAIEAENSILDISGFSKQYNCAFIWQKDGVKKLNLYLIINYFKGGKLRFKKIKPEAFEANRFYTVINKKSGEIVPMEVNFNFDDPNLIILPLAFGKRQGREFIWNDLLSLETGSLKLANGRVIEKTLYNRRTRQDEPALFVALTFERREVLDSSNIKPMNLIGVDRGENIPAVIALTDPEGCPLSRFKDSLGNPTHILRIGESYKEKQRTIQAKKEVEQRRAGGYSRKYASKAKNLADDMVRNTARDLLYYAVTQDAMLIFENLSRGFGRQGKRTFMAERQYTRMEDWLTAKLAYEGPLPSKTYLSKTLAQYTSKTCSNCGFTITSADYDRVLEKLKKTATGWMTTINGKELKVEGQITYYNRYKRQNVVKDLSVELDRLSEESVNNDISSWTKGRSGEALSLLKKRFSHRPVQEKFVCLNCGFETHADEQAALNIARSWLFLRSQEYKKYQTNKTTGNTDKRAFVETWQSFYRKKLKEVWKPAV

SEQ ID NO: 1209 - protein, 979 aa, synthetic construct
  REGION 1..979: note = CasX variant
QEIKRINKIRRRLVKDSNTKKAGKTGPMKTLLVRVMTPDLRERLENLRKKPENIPQPISNTSRANLNKLLTDYTEMKKAILHVYWEEFQKDPVGLMSRVAQPASKKIDQNKLKPEMDEKGNLTTAGFACSQCGQPLFVYKLEQVSEKGKAYTNYFGRCNVAEHEKLILLAQLKPEKDSDEAVTYSLGKFGQRALDFYSIHVTKESTHPVKPLAQIAGNRYASGPVGKALSDACMGTIASFLSKYQDIIIEHQKVVKGNQKRLESLRELAGKENLEYPSVTLPPQPHTKEGVDAYNEVIARVRMWVNLNLWQKLKLSRDDAKPLLRLKGFPSFPLVERQANEVDWWDMVCNVKKLINEKKEDGKVFWQNLAGYKRQEALRPYLSSEEDRKKGKKFARYQLGDLLLHLEKKHGEDWGKVYDEAWERIDKKVEGLSKHIKLEEERRSEDAQSKAALTDWLRAKASFVIEGLKEADKDEFCRCELKLQKWYGDLRGKPFAIEAENSILDISGFSKQYNCAFIWQKDGVKKLNLYLIINYFKGGKLRFKKIKPEAFEANRFYTVINKKSGEIVPMEVNFNFDDPNLIILPLAFGKRQGREFIWNDLLSLETGSLKLANGRVIEKTLYNRRTRQDEPALFVALTFERREVLDSSNIKPMNLIGVDRGENIPAVIALTDPEGCPLSRFKDSLGNPTHILRIGESYKEKQRTIQAKKEVEQRRAGGYSRKYASKAKNLADDMVRNTARDLLYYAVTQDAMLIFENLSRGFGRQGKRTFMAERQYTRMEDWLTAKLAYEGLPSKTYLSKRTLAQYTSKTCSNCGFTITSADYDRVLEKLKKTATGWMTTINGKELKVEGQITYYNRYKRQNVVKDLSVELDRLSEESVNNDISSWTKGRSGEALSLLKKRFSHRPVQEKFVCLNCGFETHADEQAALNIARSWLFLRSQEYKKYQTNKTTGNTDKRAFVETWQSFYRKKLKEVWKPAV

SEQ ID NO: 1210 - protein, 979 aa, synthetic construct
  REGION 1..979: note = CasX variant
QEIKRINKIRRRLVKDSNTKKAGKTGPMKTLLVRVMTPDLRERLENLRKKPENIPQPISNTSRANLNKLLTDYTEMKKAILHVYWEEFQKDPVGLMSRVAQPASKKIDQNKLKPEMDEKGNLTTAGFACSQCGQPLFVYKLEQVSEKGKAYTNYFGRCNVAEHEKLILLAQLKPEKDSDEAVTYSLGKFGQRALDFYSIHVTKESTHPVKPLAQIAGNRYASGPVGKALSDACMGTIASFLSKYQDIIIEHQKVVKGNQKRLESLRELAGKENLEYPSVTLPPQPHTKEGVDAYNEVIARVRMWVNLNLWQKLKLSRDDAKPLLRLKGFPSFPLVERQANEVDWWDMVCNVKKLINEKKEDGKVFWQNLAGYKRQEALRPYLSSEEDRKKGKKFARYQLGDLLLHLEKKHGEDWGKVYDEAWERIDKKVEGLSKHIKLEEERRSEDAQSKAALTDWLRAKASFVIEGLKEADKDEFCRCELKLQKWYGDLRGKPFAIEAENSILDISGFSKQYNCAFIWQKDGVKKLNLYLIINYFKGGKLRFKKIKPEAFEANRFYTVINKKSGEIVPMEVNFNFDDPNLIILPLAFGKRQGREFIWNDLLSLETGSLKLANGRVIEKTLYNRRTRQDEPALFVALTFERREVLDSSNIKPMNLIGVDRGENIPAVIALTDPEGCPLSRFKDSLGNPTHILRIGESYKEKQRTIQAKKEVEQRRAGGYSRKYASKAKNLADDMVRNTARDLLYYAVTQDAMLIFENLSRGFGRQGKRTFMAERQYTRMEDWLTAKLAYEGLPSKTYLSKTLAQYTSKTCSNCWGFTITSADYDRVLEKLKKTATGWMTTINGKELKVEGQITYYNRYKRQNVVKDLSVELDRLSEESVNNDISSWTKGRSGEALSLLKKRFSHRPVQEKFVCLNCGFETHADEQAALNIARSWLFLRSQEYKKYQTNKTTGNTDKRAFVETWQSFYRKKLKEVWKPAV

SEQ ID NO: 1211 - protein, 979 aa, synthetic construct
  REGION 1..979: note = CasX variant
QEIKRINKIRRRLVKDSNTKKAGKTGPMKTLLVRVMTPDLRERLENLRKKPENIPQPISNTSRANLNKLLTDYTEMKKAILHVYWEEFQKDPVGLMSRVAQPASKKIDQNKLKPEMDEKGNLTTAGFACSQCGQPLFVYKLEQVSEKGKAYTNYFGRCNVAEHEKLILLAQLKPEKDSDEAVTYSLGKFGQRALDFYSIHVTKESTHPVKPLAQIAGNRYASGPVGKALSDACMGTIASFLSKYQDIIIEHQKVVKGNQKRLESLRELAGKENLEYPSVTLPPQPHTKEGVDAYNEVIARVRMWVNLNLWQKLKLSRDDAKPLLRLKGFPSFPLVERQANEVDWWDMVCNVKKLINEKKEDGKVFWQNLAGYKRQEALRPYLSSEEDRKKGKKFARYQLGDLLLHLEKKHGEDWGKVYDEAWERIDKKVEGLSKHIKLEEERRSEDAQSKAALTDWLRAKASFVIEGLKEADKDEFCRCELKLQKWYGDLRGKPFAIEAENSILDISGFSKQYNCAFIWQKDGVKKLNLYLIINYFKGGKLRFKKIKPEAFEANRFYTVINKKSGEIVPMEVNFNFDDPNLIILPLAFGKRQGREFIWNDLLSLETGSLKLANGRVIEKTLYNRRTRQDEPALFVALTFERREVLDSSNIKPMNLIGVDRGENIPAVIALTDPEGCPLSRFKDSLGNPTHILRIGESYKEKQRTIQAKKEVEQRRAGGYSRKYASKAKNLADDMVRNTARDLLYYAVTQDAMLIFENLSRGFGRQGKRTFMAERQYTRMEDWLTAKLANYEGLPSKTYLSKTLAQYTSKTCSNCGFTITSADYDRVLEKLKKTATGWMTTINGKELKVEGQITYYNRYKRQNVVKDLSVELDRLSEESVNNDISSWTKGRSGEALSLLKKRFSHRPVQEKFVCLNCGFETHADEQAALNIARSWLFLRSQEYKKYQTNKTTGNTDKRAFVETWQSFYRKKLKEVWKPAV

SEQ ID NO: 1212 - protein, 978 aa, synthetic construct
  REGION 1..978: note = CasX variant
QEIKRINKIRRRLVKDSNTKKAGKTGPMKTLLVRVMTPDLRERLENLRKKPENIPQPISNTSRANLNKLLTDYTEMKKAILHVYWEEFQKDPVGLMSRVAQPASKKIDQNKLKPEMDEKGNLTTAGFACSQCGQPLFVYKLEQVSEKGKAYTNYFGRCNVAEHEKLILLAQLKPEKDSDEAVTYSLGKFGQRALDFYSIHVTKESTHPVKPLAQIAGNRYASGPVGKALSDACMGTIASFLSKYQDIIIEHQKVVKGNQKRLESLRELAGKENLEYPSVTLPPQPHTKEGVDAYNEVIARVRMWVNLNLWQKLKLSRDDAKPLLRLKGFPSFPLVERQANEVDWWDMVCNVKKLINEKKEDGKVFWQNLAGYKRQEALRPYLSSEEDRKKGKKFARYQLGDLLLHLEKKHGEDWGKVYDEAWERIDKKVEGLSKHIKLEEERRSEDAQSKAALTDWLRAKASFVIEGLKEADKDEFCRCELKLQKWYGDLRGKPFAIEAENSILDISGFSKQYNCAFIWQKDGVKKLNLYLIINYFKGGKLRFKKIKPEAFEANRFYTVINKKSGEIVPMEVNFNFDDPNLIILPLAFGKRQGREFIWNDLLSLETGSLKLANGRVIEKTLYNRRTRQDEPALFVALTFERREVLDSSNIKPMNLIGVDRGENIPAVIALTDPEGCPLSRFKDSLGNPTHILRIGESYKEKQRTIQAKKEVEQRRAGGYSRKYASKAKNLADDMVRNTARDLLYYAVTQDAMLIFENLSRGFGRQGKRTFMAERQYTRMEDWLTAKLAYEGLPSKTYLSKTLAQYTSKTCSNSGFTITSADYDRVLEKLKKTATGWMTTINGKELKVEGQITYYNRYKRQNVVKDLSVELDRLSEESVNNDISSWTKGRSGEALSLLKKRFSHRPVQEKFVCLNCGFETHADEQAALNIARSWLFLRSQEYKKYQTNKTTGNTDKRAFVETWQSFYRKKLKEVWKPAV

SEQ ID NO: 1213 - protein, 978 aa, synthetic construct
  REGION 1..978: note = CasX variant
QEIKRINKIRRRLVKDSNTKKAGKTGPMKTLLVRVMTPDLRERLENLRKKPENIPQPISNTSRANLNKLLTDYTEMKKAILHVYWEEFQKDPVGLMSRVAQPASKKIDQNKLKPEMDEKGNLTTAGFACSQCGQPLFVYKLEQVSEKGKAYTNYFGRCNVAEHEKLILLAQLKPEKDSDEAVTYSLGKFGQRALDFYSIHVTKESTHPVKPLAQIAGNRYASGPVGKALSDACMGTIASFLSKYQDIIIEHQKVVKGNQKRLESLRELAGKENLEYPSVTLPPQPHTKEGVDAYNEVIARVRMWVNLNLWQKLKLSRDDAKPLLRLKGFPSFPLVERQANEVDWWDMVCNVKKLINEKKEDGKVFWQNLAGYKRQEALRPYLSSEEDRKKGKKFARYQLGDLLLHLEKKHGEDWGKVYDEAWERIDKKVEGLSKHIKLEEERRSEDAQSKAALTDWLRAKASFVIEGLKEADKDEFCRCELKLQKWYGDLRGKPFAIEAENSILDISGFSKQYNCAFIWQKDGVKKLNLYLIINYFKGGKLRFKKIKPEAFEANRFYTVINKKSGEIVPMEVNFNFDDPNLIILPLAFGKRQGREFIWNDLLSLETGSLKLANGRVIEKTLYNRRTRQDEPALFVALTFERREVLDSSNIKPMNLIGVDRGENIPAVIALTDPEGCPLSRFKDSLGNPTHILRIGESYKEKQRTIQAKKEVEQRRAGGYSRKYASKAKNLADDMVRNTARDLLYYAVTQDAMLIFENLSRGFGRQGKRTFMAERQYTRMEDWLTAKLAYEGLPSKTYLSKTLSQYTSKTCSNCGFTITSADYDRVLEKLKKTATGWMTTINGKELKVEGQITYYNRYKRQNVVKDLSVELDRLSEESVNNDISSWTKGRSGEALSLLKKRFSHRPVQEKFVCLNCGFETHADEQAALNIARSWLFLRSQEYKKYQTNKTTGNTDKRAFVETWQSFYRKKLKEVWKPAV

SEQ ID NO: 1214 - protein, 979 aa, synthetic construct
  REGION 1..979: note = CasX variant
QEIKRINKIRRRLVKDSNTKKAGKTGPMKTLLVRVMTPDLRERLENLRKKPENIPQPISNTSRANLNKLLTDYTEMKKAILHVYWEEFQKDPVGLMSRVAQPASKKIDQNKLKPEMDEKGNLTTAGFACSQCGQPLFVYKLEQVSEKGKAYTNYFGRCNVAEHEKLILLAQLKPEKDSDEAVTYSLGKFGQRALDFYSIHVTKESTHPVKPLAQIAGNRYASGPVGKALSDACMGTIASFLSKYQDIIIEHQKVVKGNQKRLESLRELAGKENLEYPSVTLPPQPHTKEGVDAYNEVIARVRMWVNLNLWQKLKLSRDDAKPLLRLKGFPSFPLVERQANEVDWWDMVCNVKKLINEKKEDGKVFWQNLAGYKRQEALRPYLSSEEDRKKGKKFARYQLGDLLLHLEKKHGEDWGKVYDEAWERIDKKVEGLSKHIKLEEERRSEDAQSKAALTDWLRAKASFVIEGLKEADKDEFCRCELKLQKWYGDLRGKPFAIEAENSILDISGFSKQYNCAFIWQKDGVKKLNLYLIINYFKGGKLRFKKIKPEAFEANRFYTVINKKSGEIVPMEVNFNFDDPNLIILPLAFGKRQGREFIWNDLLSLETGSLKLANGRVIEKTLYNRRTRQDEPALFVALTFERREVLDSSNIKPMNLIGVDRGENIPAVIALTDPEGCPLSRFKDSLGNPTHILRIGESYKEKQRTIQAKKEVEQRRAGGYSRKYASKAKNLADDMVRNTARDLLYYAVTQDAMLIFENLSRGFGRQGKRTFMAERQYTRMEDWLTAKLAYEGLPSKTYRLSKTLAQYTSKTCSNCGFTITSADYDRVLEKLKKTATGWMTTINGKELKVEGQITYYNRYKRQNVVKDLSVELDRLSEESVNNDISSWTKGRSGEALSLLKKRFSHRPVQEKFVCLNCGFETHADEQAALNIARSWLFLRSQEYKKYQTNKTTGNTDKRAFVETWQSFYRKKLKEVWKPAV

SEQ ID NO: 1215 - protein, 978 aa, synthetic construct
  REGION 1..978: note = CasX variant
QEIKRINKIRRRLVKDSNTKKAGKTGPMKTLLVRVMTPDLRERLENLRKKPENIPQPISNTSRANLNKLLTDYTEMKKAILHVYWEEFQKDPVGLMSRVAQPASKKIDQNKLKPEMDEKGNLTTAGFACSQCGQPLFVYKLEQVSEKGKAYTNYFGRCNVAEHEKLILLAQLKPEKDSDEAVTYSLGKFGQRALDFYSIHVTKESTHPVKPLAQIAGNRYASGPVGKALSDACMGTIASFLSKYQDIIIEHQKVVKGNQKRLESLRELAGKENLEYPSVTLPPQPHTKEGVDAYNEVIARVRMWVNLNLWQKLKLSRDDAKPLLRLKGFPSFPLVERQANEVDWWDMVCNVKKLINEKKEDGKVFWQNLAGYKRQEALRPYLSSEEDRKKGKKFARYQLGDLLLHLEKKHGEDWGKVYDEAWERIDKKVEGLSKHIKLEEERRSEDAQSKAALTDWLRAKASFVIEGLKEADKDEFCRCELKLQKWYGDLRGKPFAIEAENSILDISGFSKQYNCAFIWQKDGVKKLNLYLIINYFKGGKLRFKKIKPEAFEANRFYTVINKKSGEIVPMEVNFNFDDPNLIILPLAFGKRQGREFIWNDLLSLETGSLKLANGRVIEKTLYNRRTRQDEPALFVALTFERREVLDSSNIKPMNLIGVDRGENIPAVIALTDPEGCPLSRFKDSLGNPTHILRIGESYKEKQRTIQAKKEVEQRRAGGYSRKYASKAKNLADDMVRNTARDLLYYAVTQDAMLIFENLSRGFGRQGKRTFMAERQYTRMEDWLTAKRAYEGLPSKTYLSKTLAQYTSKTCSNCGFTITSADYDRVLEKLKKTATGWMTTINGKELKVEGQITYYNRYKRQNVVKDLSVELDRLSEESVNNDISSWTKGRSGEALSLLKKRFSHRPVQEKFVCLNCGFETHADEQAALNIARSWLFLRSQEYKKYQTNKTTGNTDKRAFVETWQSFYRKKLKEVWKPAV

SEQ ID NO: 1216 - protein, 978 aa, synthetic construct
  REGION 1..978: note = CasX variant
QEIKRINKIRRRLVKDSNTKKAGKTGPMKTLLVRVMTPDLRERLENLRKKPENIPQPISNTSRANLNKLLTDYTEMKKAILHVYWEEFQKDPVGLMSRVAQPASKKIDQNKLKPEMDEKGNLTTAGFACSQCGQPLFVYKLEQVSEKGKAYTNYFGRCNVAEHEKLILLAQLKPEKDSDEAVTYSLGKFGQRALDFYSIHVTKESTHPVKPLAQIAGNRYASGPVGKALSDACMGTIASFLSKYQDIIIEHQKVVKGNQKRLESLRELAGKENLEYPSVTLPPQPHTKEGVDAYNEVIARVRMWVNLNLWQKLKLSRDDAKPLLRLKGFPSFPLVERQANEVDWWDMVCNVKKLINEKKEDGKVFWQNLAGYKRQEALRPYLSSEEDRKKGKKFARYQLGDLLLHLEKKHGEDWGKVYDEAWERIDKKVEGLSKHIKLEEERRSEDAQSKAALTDWLRAKASFVIEGLKEADKDEFCRCELKLQKWYGDLRGKPFAIEAENSILDISGFSKQYNCAFIWQKDGVKKLNLYLIINYFKGGKLRFKKIKPEAFEANRFYTVINKKSGEIVPMEVNFNFDDPNLIILPLAFGKRQGREFIWNDLLSLETGSLKLANGRVIEKTLYNRRTRQDEPALFVALTFERREVLDSSNIKPMNLIGVDRGENIPAVIALTDPEGCPLSRFKDSLGNPTHILRIGESYKEKQRTIQAKKEVEQRRAGGYSRKYASKAKNLADDMVRNTARDLLYYAVTQDAMLIFENLSRGFGRQGKRTFMAERQYTRMEDWLTAKDAYEGLPSKTYLSKTLAQYTSKTCSNCGFTITSADYDRVLEKLKKTATGWMTTINGKELKVEGQITYYNRYKRQNVVKDLSVELDRLSEESVNNDISSWTKGRSGEALSLLKKRFSHRPVQEKFVCLNCGFETHADEQAALNIARSWLFLRSQEYKKYQTNKTTGNTDKRAFVETWQSFYRKKLKEVWKPAV

SEQ ID NO: 1217 - protein, 978 aa, synthetic construct
  REGION 1..978: note = CasX variant
QEIKRINKIRRRLVKDSNTKKAGKTGPMKTLLVRVMTPDLRERLENLRKKPENIPQPISNTSRANLNKLLTDYTEMKKAILHVYWEEFQKDPVGLMSRVAQPASKKIDQNKLKPEMDEKGNLTTAGFACSQCGQPLFVYKLEQVSEKGKAYTNYFGRCNVAEHEKLIQLAQLKPEKDSDEAVTYSLGKFGQRALDFYSIHVTKESTHPVKPLAQIAGNRYASGPVGKALSDACMGTIASFLSKYQDIIIEHQKVVKGNQKRLESLRELAGKENLEYPSVTLPPQPHTKEGVDAYNEVIARVRMWVNLNLWQKLKLSRDDAKPLLRLKGFPSFPLVERQANEVDWWDMVCNVKKLINEKKEDGKVFWQNLAGYKRQEALRPYLSSEEDRKKGKKFARYQLGDLLLHLEKKHGEDWGKVYDEAWERIDKKVEGLSKHIKLEEERRSEDAQSKAALTDWLRAKASFVIEGLKEADKDEFCRCELKLQKWYGDLRGKPFAIEAENSILDISGFSKQYNCAFIWQKDGVKKLNLYLIINYFKGGKLRFKKIKPEAFEANRFYTVINKKSGEIVPMEVNFNFDDPNLIILPLAFGKRQGREFIWNDLLSLETGSLKLANGRVIEKTLYNRRTRQDEPALFVALTFERREVLDSSNIKPMNLIGVDRGENIPAVIALTDPEGCPLSRFKDSLGNPTHILRIGESYKEKQRTIQAKKEVEQRRAGGYSRKYASKAKNLADDMVRNTARDLLYYAVTQDAMLIFENLSRGFGRQGKRTFMAERQYTRMEDWLTAKLAYEGLPSKTYLSKTLAQYTSKTCSNCGFTITSADYDRVLEKLKKTATGWMTTINGKELKVEGQITYYNRYKRQNVVKDLSVELDRLSEESVNNDISSWTKGRSGEALSLLKKRFSHRPVQEKFVCLNCGFETHADEQAALNIARSWLFLRSQEYKKYQTNKTTGNTDKRAFVETWQSFYRKKLKEVWKPAV

SEQ ID NO: 1218 - protein, 978 aa, synthetic construct
  REGION 1..978: note = CasX variant
QEIKRINKIRRRLVKDSNTKKAGKTGPMKTLLVRVMTPDLRERLENLRKKPENIPQPISNTSRANLNKLLTDYTEMKKAILHVYWEEFQKDPVGLMSRVAQPASKKIDQNKLKPEMDEKGNLTTAGFACSQCGQPLFVYKLEQVSEKGKAYTNYFGRCNVAEHEKLILLAQLKPEKDSDEAVTYSLGKFGQRALDFYSIHVTKESTHPVKPLAQIAGNRYMSGPVGKALSDACMGTIASFLSKYQDIIIEHQKVVKGNQKRLESLRELAGKENLEYPSVTLPPQPHTKEGVDAYNEVIARVRMWVNLNLWQKLKLSRDDAKPLLRLKGFPSFPLVERQANEVDWWDMVCNVKKLINEKKEDGKVFWQNLAGYKRQEALRPYLSSEEDRKKGKKFARYQLGDLLLHLEKKHGEDWGKVYDEAWERIDKKVEGLSKHIKLEEERRSEDAQSKAALTDWLRAKASFVIEGLKEADKDEFCRCELKLQKWYGDLRGKPFAIEAENSILDISGFSKQYNCAFIWQKDGVKKLNLYLIINYFKGGKLRFKKIKPEAFEANRFYTVINKKSGEIVPMEVNFNFDDPNLIILPLAFGKRQGREFIWNDLLSLETGSLKLANGRVIEKTLYNRRTRQDEPALFVALTFERREVLDSSNIKPMNLIGVDRGENIPAVIALTDPEGCPLSRFKDSLGNPTHILRIGESYKEKQRTIQAKKEVEQRRAGGYSRKYASKAKNLADDMVRNTARDLLYYAVTQDAMLIFENLSRGFGRQGKRTFMAERQYTRMEDWLTAKLAYEGLPSKTYLSKTLAQYTSKTCSNCGFTITSADYDRVLEKLKKTATGWMTTINGKELKVEGQITYYNRYKRQNVVKDLSVELDRLSEESVNNDISSWTKGRSGEALSLLKKRFSHRPVQEKFVCLNCGFETHADEQAALNIARSWLFLRSQEYKKYQTNKTTGNTDKRAFVETWQSFYRKKLKEVWKPAV

SEQ ID NO: 1219 - protein, 978 aa, synthetic construct
  REGION 1..978: note = CasX variant
QEIKRINKIRRRLVKDSNTKKAGKTGPMKTLLVRVMTPDLRERLENLRKKPENIPQPISNTSRANLNKLLTDYTEMKKAILHVYWEEFQKDPVGLMSRVAQPASKKIDQNKLKPEMDEKGNLTTAGFACSQCGQPLFVYKLEQVSEKGKAYTNYFGRCNVAEHEKLILLAQLKPEKDSDEAVTYSLGKFGQRALDFYSIHVTKESTHPVKPLAQIAGNRYASGPVGKALSDACMGTIASFLSKYQDIIIEHQKVVKGNQKRLESLRELAGKENLEYPSVTLPPQPHTKEGVDAYNEVIARVRMWVNLNLWQKLKLSRDDAKPLLRLKGFPSFPLVERQANEVDWWDMVCNVKKLINEKKEDGKVFWQNLAIYKRQEALRPYLSSEEDRKKGKKFARYQLGDLLLHLEKKHGEDWGKVYDEAWERIDKKVEGLSKHIKLEEERRSEDAQSKAALTDWLRAKASFVIEGLKEADKDEFCRCELKLQKWYGDLRGKPFAIEAENSILDISGFSKQYNCAFIWQKDGVKKLNLYLIINYFKGGKLRFKKIKPEAFEANRFYTVINKKSGEIVPMEVNFNFDDPNLIILPLAFGKRQGREFIWNDLLSLETGSLKLANGRVIEKTLYNRRTRQDEPALFVALTFERREVLDSSNIKPMNLIGVDRGENIPAVIALTDPEGCPLSRFKDSLGNPTHILRIGESYKEKQRTIQAKKEVEQRRAGGYSRKYASKAKNLADDMVRNTARDLLYYAVTQDAMLIFENLSRGFGRQGKRTFMAERQYTRMEDWLTAKLAYEGLPSKTYLSKTLAQYTSKTCSNCGFTITSADYDRVLEKLKKTATGWMTTINGKELKVEGQITYYNRYKRQNVVKDLSVELDRLSEESVNNDISSWTKGRSGEALSLLKKRFSHRPVQEKFVCLNCGFETHADEQAALNIARSWLFLRSQEYKKYQTNKTTGNTDKRAFVETWQSFYRKKLKEVWKPAV

SEQ ID NO: 1220 - protein, 979 aa, synthetic construct
  REGION 1..979: note = CasX variant
QEIKRINKIRRRLVKDSNTKKAGKTGPMKTLLVRVMTPDLRERLENLRKKPENIPQPISNTSRANLNKLLTDYTEMKKAILHVYWEEFQKDPVGLMSRVAQPASKKIDQNKLKPEMDEKGNLTTAGFACSQCGQPLFVYKLEQVSEKGKAYTNYFGRCNVAEHEKLILLAQLKPEKDSDEAVTYSLGKFGQRALDFYSIHVTKESTHPVKPLAQIAGNRYASGPVGKALSDACMGTIASFLSKYQDIIIEHQKVVKGNQKRLESLRELAGKENLEYPSVTLPPQPHTKEGVDAYNEVIARVRMWVNLNLWQKLKLSRDDAKPLLRLKGFPSFPLVERQANEVDWWDMVCNVKKLINEKKEDGKVFWQNLAGYKRQEALRPYLSSEEDVRKKGKKFARYQLGDLLLHLEKKHGEDWGKVYDEAWERIDKKVEGLSKHIKLEEERRSEDAQSKAALTDWLRAKASFVIEGLKEADKDEFCRCELKLQKWYGDLRGKPFAIEAENSILDISGFSKQYNCAFIWQKDGVKKLNLYLIINYFKGGKLRFKKIKPEAFEANRFYTVINKKSGEIVPMEVNFNFDDPNLIILPLAFGKRQGREFIWNDLLSLETGSLKLANGRVIEKTLYNRRTRQDEPALFVALTFERREVLDSSNIKPMNLIGVDRGENIPAVIALTDPEGCPLSRFKDSLGNPTHILRIGESYKEKQRTIQAKKEVEQRRAGGYSRKYASKAKNLADDMVRNTARDLLYYAVTQDAMLIFENLSRGFGRQGKRTFMAERQYTRMEDWLTAKLAYEGLPSKTYLSKTLAQYTSKTCSNCGFTITSADYDRVLEKLKKTATGWMTTINGKELKVEGQITYYNRYKRQNVVKDLSVELDRLSEESVNNDISSWTKGRSGEALSLLKKRFSHRPVQEKFVCLNCGFETHADEQAALNIARSWLFLRSQEYKKYQTNKTTGNTDKRAFVETWQSFYRKKLKEVWKPAV

SEQ ID NO: 1221 - protein, 978 aa, synthetic construct
  REGION 1..978: note = CasX variant
QEIKRINKIRRRLVKDSNTKKAGKTGPMKTLLVRVMTPDLRERLENLRKKPENIPQPISNTSRANLNKLLTDYTEMKKAILHVYWEEFQKDPVGLMSRVAQPASKKIDQNKLKPEMDEKGNLTTAGFACSQCGQPLFVYKLEQVSEKGKAYTNYFGRCNVAEHEKLILLAQLKPEKDSDEAVTYSLGKFGQRALDFYSIHVTKESTHPVKPLAQIAGNRYASGPVGKALSDACMGTIASFLSKYQDIIIEHQKVVKGNQKRLESLRELAGKENLEYPSVTLPPQPHTKEGVDAYNEVIARVRMWVNLNLWQKLKLSRDDAKPLLRLKGFPSFPLVERQANEVDWWDMVCNVKKLINEKKEDGKVFWQNLAGYKRQEALRPYLSSEEDREKGKKFARYQLGDLLLHLEKKHGEDWGKVYDEAWERIDKKVEGLSKHIKLEEERRSEDAQSKAALTDWLRAKASFVIEGLKEADKDEFCRCELKLQKWYGDLRGKPFAIEAENSILDISGFSKQYNCAFIWQKDGVKKLNLYLIINYFKGGKLRFKKIKPEAFEANRFYTVINKKSGEIVPMEVNFNFDDPNLIILPLAFGKRQGREFIWNDLLSLETGSLKLANGRVIEKTLYNRRTRQDEPALFVALTFERREVLDSSNIKPMNLIGVDRGENIPAVIALTDPEGCPLSRFKDSLGNPTHILRIGESYKEKQRTIQAKKEVEQRRAGGYSRKYASKAKNLADDMVRNTARDLLYYAVTQDAMLIFENLSRGFGRQGKRTFMAERQYTRMEDWLTAKLAYEGLPSKTYLSKTLAQYTSKTCSNCGFTITSADYDRVLEKLKKTATGWMTTINGKELKVEGQITYYNRYKRQNVVKDLSVELDRLSEESVNNDISSWTKGRSGEALSLLKKRFSHRPVQEKFVCLNCGFETHADEQAALNIARSWLFLRSQEYKKYQTNKTTGNTDKRAFVETWQSFYRKKLKEVWKPAV

SEQ ID NO: 1222 - protein, 979 aa, synthetic construct
  REGION 1..979: note = CasX variant
QEIKRINKIRRRLVKDSNTKKAGKTGPMKTLLVRVMTPDLRERLENLRKKPENIPQPISNTSRANLNKLLTDYTEMKKAILHVYWEEFQKDPVGLMSRVAQPASKKIDQNKLKPEMDEKGNLTTAGFACSQCGQPLFVYKLEQVSEKGKAYTNYFGRCNVAEHEKLILLAQLKPEKDSDEAVTYSLGKFGQRALDFYSIHVTKESTHPVKPLAQIAGNRYASGPVGKALSDACMGTIASFLSKYQDIIIEHQKVVKGNQKRLESLRELAGKENLEYPSVTLPPQPHTKEGVDAYNEVIARVRMWVNLNLWQKLKLSRDDAKPLLRLKGFPSFPLVERQANEVDWWDMVCNVKKLINEKKEDGKVFWQNLAGYKRQEALRPYLSSEEDRKKGKKFARYQLGDLLLHLEKKHGEDWGKVYDEAWERIDKKVEGLSKHIKLEEERRSEDAQSKAALTDWLRAKASFVIEGLKEADKDEMFCRCELKLQKWYGDLRGKPFAIEAENSILDISGFSKQYNCAFIWQKDGVKKLNLYLIINYFKGGKLRFKKIKPEAFEANRFYTVINKKSGEIVPMEVNFNFDDPNLIILPLAFGKRQGREFIWNDLLSLETGSLKLANGRVIEKTLYNRRTRQDEPALFVALTFERREVLDSSNIKPMNLIGVDRGENIPAVIALTDPEGCPLSRFKDSLGNPTHILRIGESYKEKQRTIQAKKEVEQRRAGGYSRKYASKAKNLADDMVRNTARDLLYYAVTQDAMLIFENLSRGFGRQGKRTFMAERQYTRMEDWLTAKLAYEGLPSKTYLSKTLAQYTSKTCSNCGFTITSADYDRVLEKLKKTATGWMTTINGKELKVEGQITYYNRYKRQNVVKDLSVELDRLSEESVNNDISSWTKGRSGEALSLLKKRFSHRPVQEKFVCLNCGFETHADEQAALNIARSWLFLRSQEYKKYQTNKTTGNTDKRAFVETWQSFYRKKLKEVWKPAV

SEQ ID NO: 1223 - protein, 978 aa, synthetic construct
  REGION 1..978: note = CasX variant
QEIKRINKIRRRLVKDSNTKKAGKTGPMKTLLVRVMTPDLRERLENLRKKPENIPQPISNTSRANLNKLLTDYTEMKKAILHVYWEEFQKDPVGLMSRVAQPASKKIDQNKLKPEMDEKGNLTTAGFACSQCGQPLFVYKLEQVSEKGKAYTNYFGRCNVAEHEKLILLAQLKPEKDSDEAVTYSLGKFGQRALDFYSIHVTKESTHPVKPLAQIAGNRYASGPVGKALSDACMGTIASFLSKYQDIIIEHQKVVKGNQKRLESLRELAGKENLEYPSVTLPPQPHTKEGVDAYNEVIARVRMWVNLNLWQKLKLSRDDAKPLLRLKGFPSFPLVERQANEVDWWDMVCNVKKLINEKKEDGKVFWQNLAGYKRQEALRPYLSSEEDRKKGKKFARYQLGDLLLHLEKKHGEDWGKVYDEAWERIDKKVEGLSKHIKLEEERRSEDAQSKAALTDWLRAKASFVIEGLKEADKDEFCRCELKLQKWYGDLRGKPFAIEAENSILDISGFSKQYNCAFIWQKDGVKKQNLYLIINYFKGGKLRFKKIKPEAFEANRFYTVINKKSGEIVPMEVNFNFDDPNLIILPLAFGKRQGREFIWNDLLSLETGSLKLANGRVIEKTLYNRRTRQDEPALFVALTFERREVLDSSNIKPMNLIGVDRGENIPAVIALTDPEGCPLSRFKDSLGNPTHILRIGESYKEKQRTIQAKKEVEQRRAGGYSRKYASKAKNLADDMVRNTARDLLYYAVTQDAMLIFENLSRGFGRQGKRTFMAERQYTRMEDWLTAKLAYEGLPSKTYLSKTLAQYTSKTCSNCGFTITSADYDRVLEKLKKTATGWMTTINGKELKVEGQITYYNRYKRQNVVKDLSVELDRLSEESVNNDISSWTKGRSGEALSLLKKRFSHRPVQEKFVCLNCGFETHADEQAALNIARSWLFLRSQEYKKYQTNKTTGNTDKRAFVETWQSFYRKKLKEVWKPAV

SEQ ID NO: 1224 - protein, 978 aa, synthetic construct
  REGION 1..978: note = CasX variant
QEIKRINKIRRRLVKDSNTKKAGKTGPMKTLLVRVMTPDLRERLENLRKKPENIPQPISNTSRANLNKLLTDYTEMKKAILHVYWEEFQKDPVGLMSRVAQPASKKIDQNKLKPEMDEKGNLTTAGFACSQCGQPLFVYKLEQVSEKGKAYTNYFGRCNVAEHEKLILLAQLKPEKDSDEAVTYSLGKFGQRALDFYSIHVTKESTHPVKPLAQIAGNRYASGPVGKALSDACMGTIASFLSKYQDIIIEHQKVVKGNQKRLESLRELAGKENLEYPSVTLPPQPHTKEGVDAYNEVIARVRMWVNLNLWQKLKLSRDDAKPLLRLKGFPSFPLVERQANEVDWWDMVCNVKKLINEKKEDGKVFWQNLAGYKRQEALRPYLSSEEDRKKGKKFARYQLGDLLLHLEKKHGEDWGKVYDEAWERIDKKVEGLSKHIKLEEERRSEDAQSKAALTDWLRAKASFVIEGLKEADKDEFCRCELKLQKWYGDLRGKPFAIEAENSILDISGFSKQYNCAFIWQKDGVKKLNLYLIINYFKGGKLRFKKIKPEAFEANRFYTVINKKSGEIVIMEVNFNFDDPNLIILPLAFGKRQGREFIWNDLLSLETGSLKLANGRVIEKTLYNRRTRQDEPALFVALTFERREVLDSSNIKPMNLIGVDRGENIPAVIALTDPEGCPLSRFKDSLGNPTHILRIGESYKEKQRTIQAKKEVEQRRAGGYSRKYASKAKNLADDMVRNTARDLLYYAVTQDAMLIFENLSRGFGRQGKRTFMAERQYTRMEDWLTAKLAYEGLPSKTYLSKTLAQYTSKTCSNCGFTITSADYDRVLEKLKKTATGWMTTINGKELKVEGQITYYNRYKRQNVVKDLSVELDRLSEESVNNDISSWTKGRSGEALSLLKKRFSHRPVQEKFVCLNCGFETHADEQAALNIARSWLFLRSQEYKKYQTNKTTGNTDKRAFVETWQSFYRKKLKEVWKPAV

SEQ ID NO: 1225 - protein, 978 aa, synthetic construct
  REGION 1..978: note = CasX variant
QEIKRINKIRRRLVKDSNTKKAGKTGPMKTLLVRVMTPDLRERLENLRKKPENIPQPISNTSRANLNKLLTDYTEMKKAILHVYWEEFQKDPVGLMSRVAQPASKKIDQNKLKPEMDEKGNLTTAGFACSQCGQPLFVYKLEQVSEKGKAYTNYFGRCNVAEHEKLILLAQLKPEKDSDEAVTYSLGKFGQRALDFYSIHVTKESTHPVKPLAQIAGNRYASGPVGKALSDACMGTIASFLSKYQDIIIEHQKVVKGNQKRLESLRELAGKENLEYPSVTLPPQPHTKEGVDAYNEVIARVRMWVNLNLWQKLKLSRDDAKPLLRLKGFPSFPLVERQANEVDWWDMVCNVKKLINEKKEDGKVFWQNLAGYKRQEALRPYLSSEEDRKKGKKFARYQLGDLLLHLEKKHGEDWGKVYDEAWERIDKKVEGLSKHIKLEEERRSEDAQSKAALTDWLRAKASFVIEGLKEADKDEFCRCELKLQKWYGDLRGKPFAIEAENSILDISGFSKQYNCAFIWQKDGVKKLNLYLIINYFKGGKLRFKKIKPEAFEANRFYTVINKKSGEIVPMEVNFNFDDPNLIILPLAFGKRQGREFIWNDLLSLETGSLKLANGRVIEKTLYNRRTRQDEPALFVALTFERREVNDSSNIKPMNLIGVDRGENIPAVIALTDPEGCPLSRFKDSLGNPTHILRIGESYKEKQRTIQAKKEVEQRRAGGYSRKYASKAKNLADDMVRNTARDLLYYAVTQDAMLIFENLSRGFGRQGKRTFMAERQYTRMEDWLTAKLAYEGLPSKTYLSKTLAQYTSKTCSNCGFTITSADYDRVLEKLKKTATGWMTTINGKELKVEGQITYYNRYKRQNVVKDLSVELDRLSEESVNNDISSWTKGRSGEALSLLKKRFSHRPVQEKFVCLNCGFETHADEQAALNIARSWLFLRSQEYKKYQTNKTTGNTDKRAFVETWQSFYRKKLKEVWKPAV

SEQ ID NO: 1226 - protein, 979 aa, synthetic construct
  REGION 1..979: note = CasX variant
QEIKRINKIRRRLVKDSNTKKAGKTGPMKTLLVRVMTPDLRERLENLRKKPENIPQPISNTSRANLNKLLTDYTEMKKAILHVYWEEFQKDPVGLMSRVAQPASKKIDQNKLKPEMDEKGNLTTAGFACSQCGQPLFVYKLEQVSEKGKAYTNYFGRCNVAEHEKLILLAQLKPEKDSDEAVTYSLGKFGQRALDFYSIHVTKESTHPVKPLAQIAGNRYASGPVGKALSDACMGTIASFLSKYQDIIIEHQKVVKGNQKRLESLRELAGKENLEYPSVTLPPQPHTKEGVDAYNEVIARVRMWVNLNLWQKLKLSRDDAKPLLRLKGFPSFPLVERQANEVDWWDMVCNVKKLINEKKEDGKVFWQNLAGYKRQEALRPYLSSEEDRKKGKKFARYQLGDLLLHLEKKHGEDWGKVYDEAWERIDKKVEGLSKHIKLEEERRSEDAQSKAALTDWLRAKASFVIEGLKEADKDEFCRCELKLQKWYGDLRGKPFAIEAENSILDISGFSKQYNCAFIWQKDGVKKLNLYLIINYFKGGKLRFKKIKPEAFEANRFYTVINKKSGEIVPMEVNFNFDDPNLIILPLAFGKRQGREFIWNDLLSLETGSLKLANGRVIEKTLYNRRTRQDEPALFVALTFERREVLDSSNIKPMNLIGVDRGENIPAVIALTDPEGCPLSRFKDSLGNPTHILRIGESYKEKQRTIQAKKEVEQRRAGGYSRKYASKAKNLADDMVRNTARDLLYYAVTQDAMLIFENLSRGFGRQGKRTFMAERQYTRMEDWLTAKLAYEGLPSGKTYLSKTLAQYTSKTCSNCGFTITSADYDRVLEKLKKTATGWMTTINGKELKVEGQITYYNRYKRQNVVKDLSVELDRLSEESVNNDISSWTKGRSGEALSLLKKRFSHRPVQEKFVCLNCGFETHADEQAALNIARSWLFLRSQEYKKYQTNKTTGNTDKRAFVETWQSFYRKKLKEVWKPAV

SEQ ID NO: 1227 - protein, 978 aa, synthetic construct
  REGION 1..978: note = CasX variant
QEIKRINKIRRRLVKDSNTKKAGKTGPMKTLLVRVMTPDLRERLENLRKKPENIPQPISNTSRANLNKLLTDYTEMKKAILHVYWEEFQKDPVGLMSRVAQPASKKIDQNKLKPEMDEKGNLTTAGFACSQCGQPLFVYKLEQVSEKGKAYTNYFGRCNVAEHEKLILLAQLKPEKDSDEAVTYSLGKFGQRALDFYSIHVTKESTHPVKPLAQIAGNRYASGPVGKALSDACMGTIASFLSKYQDIIIEHQKVVKGNQKRLESLRELAGKENLEYPSVTLPPQPHTKEGVDAYNEVIARVRMWVNLNLWQKLKLSRDDAKPLLRLKGFPSFPLVERQANEVDWWDMVCNVKKLINEKKEDGKVFWQNLAGYKRQEALRPYLSSEEDRKKGKKFARYQLGDLLLHLEKKHGEDWGKVYDEAWERIDKKVEGLSKHIKLEEERRSEDAQSKAALTDWLRAKASFVIEGLKEADKDEFCRCELKLQKWYGDLRGKPFAIEAENSILDISGFSKQYNCAFIWQKDGVKKLNLYLIINYFKGGKLRFKKIKPEAFEANRFYTVINKKSGEIVPMEVNFNFDDPNLIILPLAFGKRQGREFIWNDLLSLETGSLKLANGRVIEKTLYNRRTRQDEPALFVALTFERREVLDSSNIKPMNLIGVDRGENIPAVIALTDPEGCPLSRFKDSLGNPTHILRIGESYKEKQRTIQAKKEVEQRRAGGYSRKYASKAKNLADDMVRNTARDLLYYAVTQDAMLIFENLSRGFGRQGKRTFMAERQYTRMEDWLTAKLAYEGLPSKTYLSKTLAQYTSKTCSNCGFTITSADYDRMLEKLKKTATGWMTTINGKELKVEGQITYYNRYKRQNVVKDLSVELDRLSEESVNNDISSWTKGRSGEALSLLKKRFSHRPVQEKFVCLNCGFETHADEQAALNIARSWLFLRSQEYKKYQTNKTTGNTDKRAFVETWQSFYRKKLKEVWKPAV

SEQ ID NO: 1228 - protein, 978 aa, synthetic construct
  REGION 1..978: note = CasX variant
QEIKRINKIRRRLVKDSNTKKAGKTGPMKTLLVRVMTPDLRERLENLRKKPENIPQPISNTSRANLNKLLTDYTEMKKAILHVYWEEFQKDPVGLMSRVAQPASKKIDQNKLKPEMDEKGNLTTAGFACSQCGQPLFVYKLEQVSEKGKAYTNYFGRCNVAEHEKLILLAQLKPEKDSDEAVTYSLGKFGQRALDFYSIHVTKESTHPVKPLAQIAGNRYASGPVGKALSDACMGTIASFLSKYQDIIIEHQKVVKGNQKRLESLRELAGKENLEYPSVTLPPQPHTKEGVDAYNEVIARVRMWVNLNLWQKLKLSRDDAKPLLRLKGFPSFPLVERQANEVDWWDMVCNVKKLINEKKEDGKVFWQNLAGYKRQEALRPYLSSEEDRKKGKKFARYQLGDLLLHLEKKHGEDWGKVYDEAWERIDKKVEGLSKHIKLEEERRSEDAQSKAALTDWLRAKASFVIEGLKEADKDEFCRCELKLQKWYGDLRGKPFAIEAENSILDISGFSKQYNCAFIWQKDGVKKLNLYLIINYFKGGKLRFKKIKPEAFEANRFYTVINKKSGEIVPMEVNFNFDDPNLIILPLAFGKRQGREFIWNDLLSLETGSLKLANGRVIEKTLYNRRTRQDEPALFVALTFERREVLDSSNIKPMNLIGVDRGENIPAVIALTDPEGCPLSRFKDSLGNPTHILRIGESYKEKQRTIQAKKEVEQRRAGGYSRKYASKAKNLADDMVRNTARDLLYYAVTQDAMLIFENLSRGFGRQGKRTFMAERQYTRMEDWLTAKLAYEGLPSKTYLSKTLAQYTSKTCSNCGFTITSADYDRVLEKLKKTATGWMTTINGKELKVEGQITYYNRYKRQNVVKDLSVELDRLSEESVNNDISSWTKGRQGEALSLLKKRFSHRPVQEKFVCLNCGFETHADEQAALNIARSWLFLRSQEYKKYQTNKTTGNTDKRAFVETWQSFYRKKLKEVWKPAV

SEQ ID NO: 1229 - protein, 978 aa, synthetic construct
  REGION 1..978: note = CasX variant
QEIKRINKIRRRLVKDSNTKKAGKTGPMKTLLVRVMTPDLRERLENLRKKPENIPQPISNTSRANLNKLLTDYTEMKKAILHVYWEEFQKDPVGLMSRVAQPASKKIDQNKLKPEMDEKGNLTTAGFACSQCGQPLFVYKLEQVSEKGKAYTNYFGRCNVAEHEKLILLAQLKPEKDSDEAVTYSLGKFGQRALDFYSIHVTKESTHPVKPLAQIAGNRYASGPVGKALSDACMGTIASFLSKYQDIIIEHQKVVKGNQKRLESLRELAGKENLEYPSVTLPPQPHTKEGVDAYNEVIARVRMWVNLNLWQKLKLSRDDAKPLLRLKGFPSFPLVERQANEVDWWDMVCNVKKLINEKKEDGKVFWQNLAGYKRQEALRPYLSSEEDRKKGKKFARYQLGDLLLHLEKKHGEDWGKVYDEAWERIDKKVEGLSKHIKLEEERRSEDAQSKAALTDWLRAKASFVIEGLKEADKDEFCRCELKLQKWYGDLRGKPFAIEAENSILDISGFSKQYNCAFIWQKDGVKKLNLYLIINYFKGGKLRFKKIKPEAFEANRFYTVINKKSGEIVPMEVNFNFDDPNLIILPLAFGKRQGREFIWNDLLSLETGSLKLANGRVIEKTLYNRRTRQDEPALFVALTFERREVLDSSNIKPMNLIGVDRGENIPAVIALTDPEGCPLSRFKDSLGNPTHILRIGESYKEKQRTIQAKKEVEQRRAGGYSRKYASKAKNLADDMVRNTARDLLYYAVTQDAMLIFENLSRGFGRQGKRTFMAERQYTRMEDWLTAKLAYEGLPSKTYLSKTLAQYTSKTCSNCGFTITSADYDRVLEKLKKTATGWMTTINGKELKVEGQITYYNRYKRQNVVKDLSVELDRLSEESVNNDISSWTKGRSGEALSLLKKRFSHRPVQEKFVCLNCEFETHADEQAALNIARSWLFLRSQEYKKYQTNKTTGNTDKRAFVETWQSFYRKKLKEVWKPAV

SEQ ID NO: 1230 - protein, 979 aa, synthetic construct
  REGION 1..979: note = CasX variant
QEIKRINKIRRRLVKDSNTKKAGKTGPMKTLLVRVMTPDLRERLENLRKKPENIPQPISNTSRANLNKLLTDYTEMKKAILHVYWEEFQKDPVGLMSRVAQPASKKIDQNKLKPEMDEKGNLTTAGFACSQCGQPLFVYKLEQVSEKGKAYTNYFGRCNVAEHEKLILLAQLKPEKDSDEAVTYSLGKFGQRALDFYSIHVTKESTHPVKPLAQIAGNRYASGPVGKALSDACMGTIASFLSKYQDIIIEHQKVVKGNQKRLESLRELAGKENLEYPSVTLPPQPHTKEGVDAYNEVIARVRMWVNLNLWQKLKLSRDDAKPLLRLKGFPSFPLVERQANEVDWWDMVCNVKKLINEKKEDGKVFWQNLAGYKRQEALRPYLSSEEDRKKGKKFARYQLGDLLLHLEKKHGEDWGKVYDEAWERIDKKVEGLSKHIKLEEERRSEDAQSKAALTDWLRAKASFVIEGLKEADKDEFCRCELKLQKWYGDLRGKPFAIEAENSILDISGFSKQYNCAFIWQKDGVKKLNLYLIINYFKGGKLRFKKIKPEAFEANRFYTVINKKSGEIVPMEVNFNFDDPNLIILPLAFGKRQGREFIWNDLLSLETGSLKLANGRVIEKTLYNRRTRQDEPALFVALTFERREVLDSSNIKPMNLIGVDRGENIPAVIALTDPEGCPLSRFKDSLGNPTHILRIGESYKEKQRTIQAKKEVEQRRAGGYSRKYASKAKNLADDMVRNTARDLLYYAVTQDAMLIFENLSRGFGRQGKRTFMAERQYTRMEDWLTAKLAYEGLPSKTYLSKTLAQYTSKTCSNCGFTITSADYDRVLEKLKKTATGWMTTINGKELKVEGQITYYNRYKRQNVVKDLSVELDRLSEESVNNDISSWTKGRSGEALSLLKKRFSHRPVQEKFVCLNCGFETHADEQAALNIARSWLFLRSQEYKKYQTNKTSTGNTDKRAFVETWQSFYRKKLKEVWKPAV

SEQ ID NO: 1231 - protein, 979 aa, synthetic construct
  REGION 1..979: note = CasX variant
QEIKRINKIRRRLVKDSNTKKAGKTGPMKTLLVRVMTPDLRERLENLRKKPENIPQPISNTSRANLNKLLTDYTEMKKAILHVYWEEFQKDPVGLMSRVAQPASKKIDQNKLKPEMDEKGNLTTAGFACSQCGQPLFVYKLEQVSEKGKAYTNYFGRCNVAEHEKLILLAQLKPEKDSDEAVTYSLGKFGQRALDFYSIHVTKESTHPVKPLAQIAGNRYASGPVGKALSDACMGTIASFLSKYQDIIIEHQKVVKGNQKRLESLRELAGKENLEYPSVTLPPQPHTKEGVDAYNEVIARVRMWVNLNLWQKLKLSRDDAKPLLRLKGFPSFPLVERQANEVDWWDMVCNVKKLINEKKEDGKVFWQNLAGYKRQEALRPYLSSEEDRKKGKKFARYQLGDLLLHLEKKHGEDWGKVYDEAWERIDKKVEGLSKHIKLEEERRSEDAQSKAALTDWLRAKASFVIEGLKEADKDEFCRCELKLQKWYGDLRGKPFAIEAENSILDISGFSKQYNCAFIWQKDGVKKLNLYLIINYFKGGKLRFKKIKPEAFEANRFYTVINKKSGEIVPMEVNFNFDDPNLIILPLAFGKRQGREFIWNDLLSLETGSLKLANGRVIEKTLYNRRTRQDEPALFVALTFERREVLDSSNIKPMNLIGVDRGENIPAVIALTDPEGCPLSRFKDSLGNPTHILRIGESYKEKQRTIQAKKEVEQRRAGGYSRKYASKAKNLADDMVRNTARDLLYYAVTQDAMLIFENLSRGFGRQGKRTFMAERQYTRMEDWLTAKLAYEGLPSKTYLSKTLAQYTSKTCSNCGFTITSADYDRVLEKLKKTATGWMTTINGKELKVEGQITYYNRYKRQNVVKDLSVELDRLSEESVNNDISSWTKGRSGEALSLLKKRFSHRPVQEKFVCLNCGFETHADEQAALNIARSWLFLRSQEYKKYQTNKTTGKNTDKRAFVETWQSFYRKKLKEVWKPAV

SEQ ID NO: 1232 - protein, 977 aa, synthetic construct; identical to SEQ ID NO: 1107
  REGION 1..977: note = dCasX variant

SEQ ID NO: 1233 - protein, 979 aa, synthetic construct; identical to SEQ ID NO: 1108
  REGION 1..979: note = dCasX variant

SEQ ID NO: 1234 - protein, 972 aa, synthetic construct; identical to SEQ ID NO: 1109
  REGION 1..972: note = dCasX variant

SEQ ID NO: 1235 - protein, 979 aa, synthetic construct; identical to SEQ ID NO: 1110
  REGION 1..979: note = dCasX variant

SEQ ID NO: 1236 - protein, 150 aa, synthetic construct
  REGION 1..150: note = nuclear localization signal
TLESPAAKRVKLDGGSPAAKRVKLDGGSPAAKRVKLDGGSPAAKRVKLDGGSPAAKRVKLDGGSPAAKRVKLDTLESKRPAATKKAGQAKKKKGGSKRPAATKKAGQAKKKKGGSKRPAATKKAGQAKKKKGGSKRPAATKKAGQAKKKK

SEQ ID NO: 1237 - protein, 135 aa, synthetic construct
  REGION 1..135: note = nuclear localization signal
TLESKRPAATKKAGQAKKKKTLESKRPAATKKAGQAKKKKGGSKRPAATKKAGQAKKKKGGSKRPAATKKAGQAKKKKGGSKRPAATKKAGQAKKKKGGSKRPAATKKAGQAKKKKGGSKRPAATKKAGQAKKKK

SEQ ID NO: 1238 - protein, 80 aa, synthetic construct
  REGION 1..80: note = nuclear localization signal
TLESKRPAATKKAGQAKKKKGGSKRPAATKKAGQAKKKKTLESPKKKRKVGGSPKKKRKVGGSPKKKRKVGGSPKKKRKV

SEQ ID NO: 1239 - protein, 54 aa, synthetic construct
  REGION 1..54: note = nuclear localization signal
TLEGGSPKKKRKVTLESPKKKRKVGGSPKKKRKVGGSPKKKRKVGGSPKKKRKV

SEQ ID NO: 1240 - protein, 62 aa, synthetic construct
  REGION 1..62: note = nuclear localization signal
TLEGGSPKKKRKVTLESPAAKRVKLDGGSPAAKRVKLDGGSPAAKRVKLDGGSPAAKRVKLD

SEQ ID NO: 1241 - protein, 86 aa, synthetic construct
  REGION 1..86: note = nuclear localization signal
TLEGGSPKKKRKVTLESPAAKRVKLDGGSPAAKRVKLDGGSPAAKRVKLDGGSPAAKRVKLDGGSPAAKRVKLDGGSPAAKRVKLD

SEQ ID NO: 1242 - protein, 33 aa, synthetic construct
  REGION 1..33: note = nuclear localization signal
TLEGGSPKKKRKVTLESKRPAATKKAGQAKKKK

SEQ ID NO: 1243 - protein, 52 aa, synthetic construct
  REGION 1..52: note = nuclear localization signal
TLEGGSPKKKRKVTLESKRPAATKKAGQAKKKKGGSKRPAATKKAGQAKKKK

SEQ ID NO: 1244 - protein, 26 aa, synthetic construct
  REGION 1..26: note = nuclear localization signal
TLEGGSPKKKRKVTLEGGSPKKKRKV

SEQ ID NO: 1245 - protein, 47 aa, synthetic construct
  REGION 1..47: note = nuclear localization signal
TLEVGPKRTADSQHSTPPKTKRKVEFEPKKKRKVTLEGGSPKKKRKV

SEQ ID NO: 1246 - protein, 53 aa, synthetic construct
  REGION 1..53: note = nuclear localization signal
TLEVGGGSGGGSKRTADSQHSTPPKTKRKVEFEPKKKRKVTLEGGSPKKKRKV

SEQ ID NO: 1247 - protein, 62 aa, synthetic construct
  REGION 1..62: note = nuclear localization signal
TLEVAEAAAKEAAAKEAAAKAKRTADSQHSTPPKTKRKVEFEPKKKRKVTLEGGSPKKKRKV

SEQ ID NO: 1248 - protein, 57 aa, synthetic construct
  REGION 1..57: note = nuclear localization signal
TLEVGPPKKKRKVGGSKRTADSQHSTPPKTKRKVEFEPKKKRKVTLEGGSPKKKRKV

SEQ ID NO: 1249 - protein, 45 aa, synthetic construct
  REGION 1..45: note = nuclear localization signal
TLEVGPAEAAAKEAAAKEAAAKAPAAKRVKLDTLEGGSPKKKRKV

SEQ ID NO: 1250 - protein, 61 aa, synthetic construct
  REGION 1..61: note = nuclear localization signal
TLEVGPGGGSGGGSGGGSPAAKRVKLDTLEVGPKRTADSQHSTPPKTKRKVEFEPKKKRKV

SEQ ID NO: 1251 - protein, 65 aa, synthetic construct
  REGION 1..65: note = nuclear localization signal
TLEVGPPKKKRKVPPPPAAKRVKLDTLEVGGGSGGGSKRTADSQHSTPPKTKRKVEFEPKKKRKV

SEQ ID NO: 1252 - protein, 64 aa, synthetic construct
  REGION 1..64: note = nuclear localization signal
TLEVGPPAAKRVKLDTLEVAEAAAKEAAAKEAAAKAKRTADSQHSTPPKTKRKVEFEPKKKRKV

SEQ ID NO: 1253 - protein, 78 aa, synthetic construct
  REGION 1..78: note = nuclear localization signal
TLEVGPKRTADSQHSTPPKTKRKVEFEPKKKRKVTLEVGPPKKKRKVGGSKRTADSQHSTPPKTKRKVEFEPKKKRKV

SEQ ID NO: 1254 - protein, 72 aa, synthetic construct
  REGION 1..72: note = nuclear localization signal
TLEVGGGSGGGSKRTADSQHSTPPKTKRKVEFEPKKKRKVTLEVGPAEAAAKEAAAKEAAAKAPAAKRVKLD

SEQ ID NO: 1255 - protein, 45 aa, synthetic construct
  REGION 1..45: note = nuclear localization signal
GSKRPAATKKAGQAKKKKTLEVGPGGGSGGGSGGGSPAAKRVKLD

SEQ ID NO: 1256 - protein, 43 aa, synthetic construct
  REGION 1..43: note = nuclear localization signal
GSKRPAATKKAGQAKKKKTLEVGPPKKKRKVPPPPAAKRVKLD

SEQ ID NO: 1257 - protein, 33 aa, synthetic construct
  REGION 1..33: note = nuclear localization signal
GSKRPAATKKAGQAKKKKTLEVGPPAAKRVKLD

SEQ ID NO: 1258 - protein, 43 aa, synthetic construct
  REGION 1..43: note = nuclear localization signal
GSPKKKRKVTLEVGPKRTADSQHSTPPKTKRKVEFEPKKKRKV

SEQ ID NO: 1259 - protein, 58 aa, synthetic construct
  REGION 1..58: note = nuclear localization signal
GSKRPAATKKAGQAKKKKTLEVGGGSGGGSKRTADSQHSTPPKTKRKVEFEPKKKRKV

SEQ ID NO: 1260 - protein, 36 aa, synthetic construct
  REGION 1..36: note = nuclear localization signal
GSKRPAATKKAGQAKKKKGSKRPAATKKAGQAKKKK

SEQ ID NO: 1261 - protein, 36 aa, synthetic construct; identical to SEQ ID NO: 1260
  REGION 1..36: note = nuclear localization signal

SEQ ID NO: 1262 - protein, 36 aa, synthetic construct; identical to SEQ ID NO: 1260
  REGION 1..36: note = nuclear localization signal

SEQ ID NO: 1263 - protein, 18 aa, synthetic construct
  REGION 1..18: note = nuclear localization signal
GSPKKKRKVGSPKKKRKV

SEQ ID NO: 1264 - protein, 54 aa, synthetic construct
  REGION 1..54: note = nuclear localization signal
GGGSGGGSKRTADSQHSTPPKTKRKVEFEPKKKRKVGSKRPAATKKAGQAKKKK

SEQ ID NO: 1265 - protein, 58 aa, synthetic construct
  REGION 1..58: note = nuclear localization signal
GPPKKKRKVGGSKRTADSQHSTPPKTKRKVEFEPKKKRKVGSKRPAATKKAGQAKKKK

SEQ ID NO: 1266 - protein, 44 aa, synthetic construct
  REGION 1..44: note = nuclear localization signal
TGGGPGGGAAAGSGSPKKKRKVGSGSGSKRPAATKKAGQAKKKK

SEQ ID NO: 1267 - protein, 48 aa, synthetic construct
  REGION 1..48: note = nuclear localization signal
GPKRTADSQHSTPPKTKRKVEFEPKKKRKVGSKRPAATKKAGQAKKKK

SEQ ID NO: 1268 - protein, 54 aa, synthetic construct
  REGION 1..54: note = nuclear localization signal
AEAAAKEAAAKEAAAKAKRTADSQHSTPPKTKRKVEFEPKKKRKVGSPKKKRKV

SEQ ID NO: 1269 - protein, 57 aa, synthetic construct
  REGION 1..57: note = nuclear localization signal
GPPKKKRKVPPPPAAKRVKLDGGGSGGGSKRTADSQHSTPPKTKRKVEFEPKKKRKV

SEQ ID NO: 1270 - protein, 111 aa, synthetic construct
  REGION 1..111: note = nuclear localization signal
GSPAAKRVKLDGGSPAAKRVKLDGGSPAAKRVKLDGGSPAAKRVKLDGGSPAAKRVKLDGGSPAAKRVKLDGPPKKKRKVGGSKRTADSQHSTPPKTKRKVEFEPKKKRKV

SEQ ID NO: 1271 - protein, 67 aa, synthetic construct
  REGION 1..67: note = nuclear localization signal
GSPAAKRVKLGGSPAAKRVKLGGSPKKKRKVGGSPKKKRKVTGGGPGGGAAAGSGSPKKKRKVGSGS

SEQ ID NO: 1272 - protein, 67 aa, synthetic construct
  REGION 1..67: note = nuclear localization signal
GSKRPAATKKAGQAKKKKGGSKRPAATKKAGQAKKKKGPKRTADSQHSTPPKTKRKVEFEPKKKRKV

SEQ ID NO: 1273 - protein, 82 aa, synthetic construct
  REGION 1..82: note = nuclear localization signal
GSKRPAATKKAGQAKKKKGGSKRPAATKKAGQAKKKKAEAAAKEAAAKEAAAKAKRTADSQHSTPPKTKRKVEFEPKKKRKV

SEQ ID NO: 1274 - protein, 73 aa, synthetic construct
  REGION 1..73: note = nuclear localization signal
TLESKRPAATKKAGQAKKKKGGSKRPAATKKAGQAKKKKAPGEYPYDVPDYATSPKKKRKVALEYPYDVPDYA

SEQ ID NO: 1275 - protein, 98 aa, synthetic construct
  REGION 1..98: note = nuclear localization signal
TLESKRPAATKKAGQAKKKKGGSKRPAATKKAGQAKKKKGGSKRPAATKKAGQAKKKKGGSKRPAATKKAGQAKKKKTSPKKKRKVALEYPYDVPDYA

SEQ ID NO: 1276 - protein, 136 aa, synthetic construct
  REGION 1..136: note = nuclear localization signal
TLESKRPAATKKAGQAKKKKGGSKRPAATKKAGQAKKKKGGSKRPAATKKAGQAKKKKGGSKRPAATKKAGQAKKKKGGSKRPAATKKAGQAKKKKGGSKRPAATKKAGQAKKKKTSPKKKRKVALEYPYDVPDYA

SEQ ID NO: 1277 - protein, 74 aa, synthetic construct
  REGION 1..74: note = nuclear localization signal
TLESPKKKRKVGGSPKKKRKVGGSPKKKRKVGGSPKKKRKVTLESKRPAATKKAGQAKKKKAPGEYPYDVPDYA

SEQ ID NO: 1278 - protein, 68 aa, synthetic construct
  REGION 1..68: note = nuclear localization signal
TLESPKKKRKVGGSPKKKRKVGGSPKKKRKVGGSPKKKRKVGSKRPAATKKAGQAKKKKYPYDVPDYA

SEQ ID NO: 1279 - protein, 101 aa, synthetic construct
  REGION 1..101: note = nuclear localization signal
TLESPAAKRVKLDGGSPAAKRVKLDGGSPAAKRVKLDGGSPAAKRVKLDTLESKRPAATKKAGQAKKKKGGSKRPAATKKAGQAKKKKAPGEYPYDVPDYA

SEQ ID NO: 1280 - RNA, 31 nt, synthetic construct
  misc_feature 1..31: note = stem loop sequence
  source 1..31: mol_type = other RNA
tgggcgcagcgtcaatgacgctgacggtaca

SEQ ID NO: 1281 - RNA, 66 nt, synthetic construct
  misc_feature 1..66: note = stem loop sequence
  source 1..66: mol_type = other RNA
gcactatgggcgcagcgtcaatgacgctgacggtacaggccagacaattattgtctggtatagtgc

SEQ ID NO: 1282 - RNA, 167 nt, synthetic construct
  misc_feature 1..167: note = stem loop sequence
  source 1..167: mol_type = other RNA
caggaagcactatgggcgcagcgtcaatgacgctgacggtacaggccagacaattattgtctggtatagtgcagcagcagaacaatttgctgagggctattgaggcgcaacagcatctgttgcaactcacagtctggggcatcaagcagctccaggcaagaatcctg

SEQ ID NO: 1283 - RNA, 234 nt, synthetic construct
  misc_feature 1..234: note = stem loop sequence
  source 1..234: mol_type = other RNA
aggagctttgttccttgggttcttgggagcagcaggaagcactatgggcgcagcgtcaatgacgctgacggtacaggccagacaattattgtctggtatagtgcagcagcagaacaatttgctgagggctattgaggcgcaacagcatctgttgcaactcacagtctggggcatcaagcagctccaggcaagaatcctggctgtggaaagatacctaaaggatcaacagctcct

SEQ ID NO: 1284 - RNA, 15 nt, synthetic construct
  misc_feature 1..15: note = stem loop sequence
  source 1..15: mol_type = other RNA
gctgacggtacaggc

SEQ ID NO: 1285 - RNA, 29 nt, synthetic construct
  misc_feature 1..29: note = extended stem loop
  source 1..29: mol_type = other RNA
gcgcttacggacttcggtccgtaacaagc

SEQ ID NO: 1286 - RNA, 29 nt, synthetic construct
  misc_feature 1..29: note = extended stem loop
  source 1..29: mol_type = other RNA
gccgcttacggacttcggccgtaagaggc

SEQ ID NO: 1287 - RNA, 33 nt, synthetic construct
  misc_feature 1..33: note = pseudoknot
  source 1..33: mol_type = other RNA
actggcgcttctatctgattactctgagcgcca

SEQ ID NO: 1288 - RNA, 66 nt, synthetic construct
  misc_feature 1..66: note = scaffold and extended stems
  source 1..66: mol_type = other RNA
tcaccagcgactatgtcgtagtgggtaaagccgcttacggagttcggtccgtaagaggcatcagag

SEQ ID NO: 1289 - RNA, 18 nt, synthetic construct
  misc_feature 1..18: note = MS2 sequence
  source 1..18: mol_type = other RNA
acatgaggatcaccctgt

SEQ ID NO: 1290-2100 - skipped (811 entries)

SEQ ID NO: 2101 - RNA, 108 nt, synthetic construct
  misc_feature 1..108: note = scaffold variant
  source 1..108: mol_type = other RNA
tactggcgcttttatctcattactttgagagccatcaccagcgactatgtcgtatgggtaaagcgcaggtgggacgacctctcggtcgtcctatctgaagcatcaaag

SEQ ID NO: 2102 - RNA, 99 nt, synthetic construct
  misc_feature 1..99: note = scaffold variant
  source 1..99: mol_type = other RNA
tactggcgcttttatctcattactttgagagccatcaccagcgactatgtcgtatgggtaaagcgctgctcgacgcgtcctcgagcagaagcatcaaag

SEQ ID NO: 2103 - RNA, 97 nt, synthetic construct
  misc_feature 1..97: note = scaffold variant
  source 1..97: mol_type = other RNA
tactggcgcttttatctcattactttgagagccatcaccagcgactatgtcgtatgggtaaagcgctgctcgctccgttcgagcagaagcatcaaag

SEQ ID NO: 2104 - RNA, 91 nt, synthetic construct
  misc_feature 1..91: note = scaffold variant
  source 1..91: mol_type = other RNA
gtactggcgcttttatctcattactttgagagccatcaccagcgactatgtcgtatgggtaaagcgccctcttcggagggaagcatcaaag

SEQ ID NO: 2105 - RNA, 99 nt, synthetic construct
  misc_feature 1..99: note = scaffold variant
  source 1..99: mol_type = other RNA
tactggcgcttttatctcattactttgagagccatcaccagcgactatgtcgtatgggtaaagcgcaggagtttctatggaaaccctgaagcatcaaag

SEQ ID NO: 2106 - RNA, 99 nt, synthetic construct
  misc_feature 1..99: note = scaffold variant
  source 1..99: mol_type = other RNA
gtactggcgcctttatctcattactttgagagccatcaccagcgactatgtcgtatgggtaaagcgcttacggacttcggtccgtaagaagcatcaaag

SEQ ID NO: 2107 - RNA, 90 nt, synthetic construct
  misc_feature 1..90: note = scaffold variant
  source 1..90: mol_type = other RNA
tactggcgcttttatctcattactttgagagccatcaccagcgactatgtcgtatgggtaaagcgctgcgcttgcgcagaagcatcaaag

SEQ ID NO: 2108 - RNA, 108 nt, synthetic construct
  misc_feature 1..108: note = scaffold variant
  source 1..108: mol_type = other RNA
tactggcgcttttatctgattactttgagagccatcaccagcgactatgtcgtatgggtaaagcgcttatttatcggagagaaatccgataaataagaagcatcaaag

SEQ ID NO: 2109 - RNA, 108 nt, synthetic construct
  misc_feature 1..108: note = scaffold variant
  source 1..108: mol_type = other RNA
tactggcgcttttatcgcattactttgagagccatcaccagcgactatgtcgtatgggtaaagcgcttatttatcggagagaaatccgataaataagaagcatcaaag

SEQ ID NO: 2110 - RNA, 110 nt, synthetic construct
  misc_feature 1..110: note = scaffold variant
  source 1..110: mol_type = other RNA
tactggcgcttttatctcattactttgagagccatcaccagcgactatgtcgtatgggtaaagcgcttatttatcggagacttcggtccgataaataagaagcatcaaag

SEQ ID NO: 2111 - RNA, 97 nt, synthetic construct
  misc_feature 1..97: note = scaffold variant
  source 1..97: mol_type = other RNA
tactggcgcttttatctcattactttgagagccatcaccagcgactatgtcgtatgggtaaagcgcacatgaggattacccatgtgaagcatcaaag

SEQ ID NO: 2112 - RNA, 106 nt, synthetic construct
  misc_feature 1..106: note = scaffold variant
  source 1..106: mol_type = other RNA
gctggcgcttttatctcattactttgagagccatcaccagcgactatgtcgtatgggtaaagcgcttatttatcgtgagaaatccgataaataagaagcatcaaag

SEQ ID NO: 2113 - RNA, 96 nt, synthetic construct
  misc_feature 1..96: note = scaffold variant
  source 1..96: mol_type = other RNA
tactggcgcttttatctcattactttgagagccatcaccagcgactatgtcgtatgggtaaagcgctgcatgtctaagacagcagaagcatcaaag

SEQ ID NO: 2114 - RNA, 90 nt, synthetic construct
  misc_feature 1..90: note = scaffold variant
  source 1..90: mol_type = other RNA
tactggcgcttttatctcattactttgagagccatcaccagcgactatgtcgtatgggtaaagcgcagggcttcggccgaagcatcaaag

SEQ ID NO: 2115 - RNA, 98 nt, synthetic construct
  misc_feature 1..98: note = scaffold variant
  source 1..98: mol_type = other RNA
tactggcgcttttatctcattactttgagagccatcaccagcgactatgtcgtatgggtaaagcgcaatccattgcactccggattgaagcatcaaag

SEQ ID NO: 2116 - RNA, 108 nt, synthetic construct
  misc_feature 1..108: note = scaffold variant
  source 1..108: mol_type = other RNA
tactggcgcttttctcgcattactttgagagccatcaccagcgactatgtcgtatgggtaaagcgcttatttatcggagagaaatccgataaataagaagcatcaaag

SEQ ID NO: 2117 - RNA, 108 nt, synthetic construct
  misc_feature 1..108: note = scaffold variant
  source 1..108: mol_type = other RNA
tactggcgcttttatctcattactttgagagccatcaccagcgactatgtcgtatgggtaaagcgcttatttatcggacttcggtccgataaataagaagcatcaaag

SEQ ID NO: 2118 - RNA, 100 nt, synthetic construct
  misc_feature 1..100: note = scaffold variant
  source 1..100: mol_type = other RNA
tactggcgcttttatctcattactttgagagccatcaccagcgactatgtcgtatgggtaaagcgctgctcgtttgcggctacgagcagaagcatcaaag

SEQ ID NO: 2119 - RNA, 100 nt, synthetic construct
  misc_feature 1..100: note = scaffold variant
  source 1..100: mol_type = other RNA
tactggcgcttttatctcattactttgagagccatcaccagcgactatgtcgtatgggtaaagcgcttatttatcgagagataaataagaagcatcaaag

SEQ ID NO: 2120 - RNA, 107 nt, synthetic construct
  misc_feature 1..107: note = scaffold variant
  source 1..107: mol_type = other RNA
tacggcgcttttatctcattactttgagagccatcaccagcgactatgtcgtatgggtaaagcgcttatttatcggagagaaatccgataaataagaagcatcaaag

SEQ ID NO: 2121 - RNA, 99 nt, synthetic construct
  misc_feature 1..99: note = scaffold variant
  source 1..99: mol_type = other RNA
tactggcgccttttatctcattactttgagagccatcaccagcgactatgtcgtatgggtaaagcgcttacggacttcggtccgtaagaagcatcaaag

SEQ ID NO: 2122 - RNA, 108 nt, synthetic construct
  misc_feature 1..108: note = scaffold variant
  source 1..108: mol_type = other RNA
tactggcgcttttatctcattactttgagagccatcaccagcgactatgtcgtatcggtaaagcgcttatttatcggagagaaatccgataaataagaagcatcaaag

SEQ ID NO: 2123 - RNA, 108 nt, synthetic construct
  misc_feature 1..108: note = scaffold variant
  source 1..108: mol_type = other RNA
tactggcgcctttatctcattactttgagagccatcaccagcgactatgtcgtatgggtaaagcgcttatttatcggacttcggtccgataaataagaagcatcaaag

SEQ ID NO: 2124 - RNA, 105 nt, synthetic construct
  misc_feature 1..105: note = scaffold variant
  source 1..105: mol_type = other RNA
tactggcgcttttatctcattactttgagagccatcaccagcgactatgtcgtatgggtaaagcgcttatttatcgagaaatccgataaataagaagcatcaaag

SEQ ID NO: 2125 - RNA, 103 nt, synthetic construct
  misc_feature 1..103: note = scaffold variant
  source 1..103: mol_type = other RNA
gcgcttttatctcattactttgagagccatcaccagcgactatgtcgtatgggtaaagcgcttatttatcggagagaaatccgataaataagaagcatcaaag

SEQ ID NO: 2126 - RNA, 103 nt, synthetic construct
  misc_feature 1..103: note = scaffold variant
  source 1..103: mol_type = other RNA
tactggcgcttttatctcattactttgagagccatcaccagcgactatgtcgtatgggtaaagcgcttatttatcggagagagataaataagaagcatcaaag

SEQ ID NO: 2127 - RNA, 108 nt, synthetic construct
  misc_feature 1..108: note = scaffold variant
  source 1..108: mol_type = other RNA
tactggcgcttttatctcattactttggagagccatcaccagcgactatgtcgtatgggtaaagcgcttatttatcggagagtatccgataaataagaagcatcaaag

SEQ ID NO: 2128 - RNA, 109 nt, synthetic construct
  misc_feature 1..109: note = scaffold variant
  source 1..109: mol_type = other RNA
tactggcgcttttatctcattactttgagagccatcaccagcgactatgttcgtatgggtaaagcgcttatttatcggagagaaatccgataaataagaagcatcaaag

SEQ ID NO: 2129 - RNA, 105 nt, synthetic construct
  misc_feature 1..105: note = scaffold variant
  source 1..105: mol_type = other RNA
agcgcttttatctcattactttgagagccatcaccagcgactatgtcgtatgggtaaagcgcttatttatcggagagaaatgccgataaataagaagcatcaaag

SEQ ID NO: 2130 - RNA, 109 nt, synthetic construct
  misc_feature 1..109: note = scaffold variant
  source 1..109: mol_type = other RNA
tactggcgcttttatctcattactttgagagccatcaccagcgactatgtcgtatgggtaaagcgcttatttatcggagagaaatccgataaaataagaagcatcaaag

SEQ ID NO: 2131 - RNA, 109 nt, synthetic construct
  misc_feature 1..109: note = scaffold variant
  source 1..109: mol_type = other RNA
tactggcgcttttatctcattactttgagagccatcaccagcgactatgtcgtatgggtaaagcgcttattgtatcggagagaaatccgataaataagaagcatcaaag

SEQ ID NO: 2132 - RNA, 102 nt, synthetic construct
  misc_feature 1..102: note = scaffold variant
  source 1..102: mol_type = other RNA
gcgcttttatctcattactttgagagccatcaccagcgactatgtcgtatgggtaaagcgcttatttatcggacttcggtccgataaataagcgcatcaaag

SEQ ID NO: 2133 - RNA, 108 nt, synthetic construct
  misc_feature 1..108: note = scaffold variant
  source 1..108: mol_type = other RNA
tactggcgcttttctctcattactttgagagccatcaccagcgactatgtcgtatgggtaaagcgcttatttatcggagagaaatccgataaataagaagcatcaaag

SEQ ID NO: 2134 - RNA, 106 nt, synthetic construct
  misc_feature 1..106: note = scaffold variant
  source 1..106: mol_type = other RNA
gtggcgcttttatctcattactttgagagccatcaccagcgactatgtcgtatgggtaaagcgcttatttatcggagagaaatccgataaataagaagcatcaaag

SEQ ID NO: 2135 - RNA, 110 nt, synthetic construct
  misc_feature 1..110: note = scaffold variant
  source 1..110: mol_type = other RNA
tactggcgcttttatctcattactttgagagccatcaccagcgaccttatgtcgtatgggtaaagcgcttatttatcggagagaaatccgataaataagaagcatcaaag

SEQ ID NO: 2136 - RNA, 107 nt, synthetic construct
  misc_feature 1..107: note = scaffold variant
  source 1..107: mol_type = other RNA
gatggcgcttttatctcattactttgagagccatcaccagcgactatgtcgtatgggtaaagcgcttatttatcggacttcggtccgataaataagaagcatcaaag

SEQ ID NO: 2137 - RNA, 106 nt, synthetic construct
  misc_feature 1..106: note = scaffold variant
  source 1..106: mol_type = other RNA
tactggcgcttttatctcattactttgagagccatcaccagcgactatgtcgtatgggtaaagcgcttatttatcggagagaaatccgataaaagaagcatcaaag

SEQ ID NO: 2138 - RNA, 109 nt, synthetic construct
  misc_feature 1..109: note = scaffold variant
  source 1..109: mol_type = other RNA
tactggcgcttttatctcattactttgagagccatcaccagcgatctatgtcgtatgggtaaagcgcttatttatcggagagaaatccgataaataagaagcatcaaag

SEQ ID NO: 2139 - RNA, 106 nt, synthetic construct
  misc_feature 1..106: note = scaffold variant
  source 1..106: mol_type = other RNA
tactggcgcttttatctcattactttgagagccatcaccagcgactatgtcgtatgggtaaaggcttatttatcggagagaaatccgataaaaagaagcatcaaag

SEQ ID NO: 2140 - RNA, 107 nt, synthetic construct
  misc_feature 1..107: note = scaffold variant
  source 1..107: mol_type = other RNA
tactggcgcttttatctcattactttgagagccatcaccagcgactatgtcgtatgggtaaagcgcttatttatcggagagaaatccgataaaaagaagcatcaaag

SEQ ID NO: 2141 - RNA, 107 nt, synthetic construct
  misc_feature 1..107: note = scaffold variant
  source 1..107: mol_type = other RNA
tactggcgctttatctcattactttgagagccatcaccagcgactatgtcgtatgggtaaagcgcttatttatcggacttcggtccgataaataagaagcatcaaag

SEQ ID NO: 2142 - RNA, 98 nt, synthetic construct
  misc_feature 1..98: note = scaffold variant
  source 1..98: mol_type = other RNA
cggcgcttttctcgcattactttgagagccatcaccagcgactatgtcgtatgggtaaagcgcttattgtatcgagagataaataagaagcatcaaag

SEQ ID NO: 2143 - RNA, 107 nt, synthetic construct
  misc_feature 1..107: note = scaffold variant
  source 1..107: mol_type = other RNA
cactggcgcttttatctcattactttgagagccatcaccagcgactatgtcgtatgggtaaagcgcttattttcggagagaaatccgataaataagaagcatcaaag

SEQ ID NO: 2144 - RNA, 106 nt, synthetic construct
  misc_feature 1..106: note = scaffold variant
  source 1..106: mol_type = other RNA
tactggcgctttatctcattactttgagagccatcaccagcgacttcggtcgtatgggtaaagcgcttatgtatcggcttcggccgatacataagaagcatcaaag

SEQ ID NO: 2145 - RNA, 107 nt, synthetic construct
  misc_feature 1..107: note = scaffold variant
  source 1..107: mol_type = other RNA
tactggcgcttttatctcattactttgagagccatcaccagcgacttcggtcgtatgggtaaagcgcttatgtatcggcttcggccgatacataagaagcatcaaag

SEQ ID NO: 2146 - RNA, 109 nt, synthetic construct
  misc_feature 1..109: note = scaffold variant
  source 1..109: mol_type = other RNA
tactggcgcttttatctcattactttgagagccatcaccagcgactatgtcgtatgggtgaaagcgcttatttatcggagagaaatccgataaataagaagcatcaaag

SEQ ID NO: 2147 - RNA, 64 nt, synthetic construct
  misc_feature 1..64: note = scaffold variant
  source 1..64: mol_type = other RNA
tactggcgcttttatctcattactttgagagccatcaccagcgacttcggtcgtatgggtaaag

SEQ ID NO: 2148 - RNA, 62 nt, synthetic construct
  misc_feature 1..62: note = scaffold variant
  source 1..62: mol_type = other RNA
gatgggcttttatctcattactttgagagccatcaccagcgacttcggtcgtatgggtaaag

SEQ ID NO: 2149 - RNA, 105 nt, synthetic construct
  misc_feature 1..105: note = scaffold variant
  source 1..105: mol_type = other RNA
gatgggcttttatctcattactttgagagccatcaccagcgacttcggtcgtatgggtaaagcgcttatttatcggcttcggccgataaataagaagcatcaaag

SEQ ID NO: 2150 - RNA, 156 nt, synthetic construct
  misc_feature 1..156: note = scaffold variant
  source 1..156: mol_type = other RNA
tactggcgcttttatctcattactttgagagccatcaccagcgactatgtcgtatgggtaaagcgctacactgggatcgctgaattagagatcggcgtcctttcattctatatactttggagttttaaaatgtctctaagtacagaagcatcaaag

SEQ ID NO: 2151 - RNA, 103 nt, synthetic construct
  misc_feature 1..103: note = scaffold variant
  source 1..103: mol_type = other RNA
ggcgcttttatctcattactttgagagccatcaccagcgacttcggtcgtatgggtaaagcgcttatttatcggcttcggccgataaataagaagcatcaaag

SEQ ID NO: 2152 - RNA, 106 nt, synthetic construct
  misc_feature 1..106: note = scaffold variant
  source 1..106: mol_type = other RNA
gctggcgcttttatctcattactttgagagccatcaccagcgacttcggtcgtatgggtaaagcgcttatttatcggcttcggccgataaataagaagcatcaaag

SEQ ID NO: 2153 - RNA, 109 nt, synthetic construct
  misc_feature 1..109: note = scaffold variant
  source 1..109: mol_type = other RNA
tactggcgcttttatctcattactttgagagccatcaccagcgacttcggtcgtatgggtaaagcgcttatttatcggagagaaatccgataaataagaagcatcaaag

SEQ ID NO: 2154 - RNA, 112 nt, synthetic construct
  misc_feature 1..112: note = scaffold variant
  source 1..112: mol_type = other RNA
tactggcgcttttatctcattactttgagagccatgctccaccagcgactatgtcgtatgggtaaagcgcttatttatcggagagaaatccgataaataagaagcatcaaag

SEQ ID NO: 2155 - RNA, 97 nt, synthetic construct
  misc_feature 1..97: note = scaffold variant
  source 1..97: mol_type = other RNA
tactggcgcttttatctcattactttgagagccatcaccagcgactatgtcgtatgggtaaagcggggttagggttagggttagggaagcatcaaag

SEQ ID NO: 2156 - RNA, 96 nt, synthetic construct
  misc_feature 1..96: note = scaffold variant
  source 1..96: mol_type = other RNA
tactggcgcttttatctcattactttgagagccatcaccagcgactatgtcgtatgggtaaagcggagggagggagggagagggaaagcatcaaag

SEQ ID NO: 2157 - RNA, 101 nt, synthetic construct
  misc_feature 1..101: note = scaffold variant
  source 1..101: mol_type = other RNA
tactggcgcttttatctcattactttgagagccatcaccagcgactatgtcgtatgggtaaagcgttgggttagggttagggttagggaaaagcatcaaag

SEQ ID NO: 2158 - RNA, 91 nt, synthetic construct
  misc_feature 1..91: note = scaffold variant
  source 1..91: mol_type = other RNA
tactggcgcttttatctcattactttgagagccatcaccagcgactatgtcgtatgggtaaagcgcagggcttcggccggaagcatcaaag

SEQ ID NO: 2159 - RNA, 103 nt, synthetic construct
  misc_feature 1..103: note = scaffold variant
  source 1..103: mol_type = other RNA
tactggcgcttttatctcattactttgagagccatcaccagcgactatgtcgtatgggtaaagcgcctgctcagtacgagaggaaccgcaggaagcatcaaag

SEQ ID NO: 2160 - RNA, 90 nt, synthetic construct
  misc_feature 1..90: note = scaffold variant
  source 1..90: mol_type = other RNA
tactggcgcttttatctgattactttgagagccatcaccagcgactatgtcgtatgggtaaagcgccctcttcggagggaagcatcaaag

SEQ ID NO: 2161 - RNA, 98 nt, synthetic construct
  misc_feature 1..98: note = scaffold variant
  source 1..98: mol_type = other RNA
tactggcgcctttatctgattactttgagagccatcaccagcgactatgtcgtatgggtaaagcgcttacggacttcggtccgtaagaagcatcaaag

SEQ ID NO: 2162 - RNA, 98 nt, synthetic construct
  misc_feature 1..98: note = scaffold variant
  source 1..98: mol_type = other RNA
tactggcgcttttatctgattactttgagagccatcaccagcgactatgtcgtatgggtaaagcgcggacgacctctcggtcgtccgaagcatcaaag

SEQ ID NO: 2163 - RNA, 108 nt, synthetic construct
  misc_feature 1..108: note = scaffold variant
  source 1..108: mol_type = other RNA
tactggcgcttttatctgattactttgagagccatcaccagcgactatgtcgtatgggtaaagcgcaggtgggacgacctctcggtcgtcctatctgaagcatcaaag

SEQ ID NO: 2164 - RNA, 99 nt, synthetic construct
  misc_feature 1..99: note = scaffold variant
  source 1..99: mol_type = other RNA
tactggcgcctttatctgcattactttgagagccatcaccagcgactatgtcgtatgggtaaagcgcttacggacttcggtccgtaagaagcatcaaag

SEQ ID NO: 2165 - RNA, 97 nt, synthetic construct
  misc_feature 1..97: note = scaffold variant
  source 1..97: mol_type = other RNA
gctggcgcttttatctgattactttgagagccatcaccagcgactatgtcgtatgggtaaagcgcttacggacttcggtccgtaagaagcatcaaag

SEQ ID NO: 2166 - RNA, 108 nt, synthetic construct
  misc_feature 1..108: note = scaffold variant
  source 1..108: mol_type = other RNA
tactggcgcctttatctgattactttgagagccatcaccagcgactatgtcgtatgggtaaagcgcaggtgggacgacctctcggtcgtcctatctgaagcatcaaag

SEQ ID NO: 2167 - RNA, 98 nt, synthetic construct
  misc_feature 1..98: note = scaffold variant
  source 1..98: mol_type = other RNA
tactggcgcctttatctgattactttgagagccatcaccagcgactatgtcgtatgggtaaagcgcggacgacctctcggtcgtccgaagcatcaaag

SEQ ID NO: 2168 - RNA, 90 nt, synthetic construct
  misc_feature 1..90: note = scaffold variant
  source 1..90: mol_type = other RNA
tactggcgcctttatctcattactttgagagccatcaccagcgactatgtcgtatgggtaaagcgccctcttcggagggaagcatcaaag

SEQ ID NO: 2169 - RNA, 98 nt, synthetic construct
  misc_feature 1..98: note = scaffold variant
  source 1..98: mol_type = other RNA
tactggcgcttttatctcattactttgagagccatcaccagcgactatgtcgtatgggtaaagcgcttacggacttcggtccgtaagaagcatcaaag

SEQ ID NO: 2170 - RNA, 99 nt, synthetic construct
  misc_feature 1..99: note = scaffold variant
  source 1..99: mol_type = other RNA
tactggcgcctttatcatcattactttgagagccatcaccagcgactatgtcgtatgggtaaagcgcttacggacttcggtccgtaagaagcatcaaag

SEQ ID NO: 2171 - RNA, 194 nt, synthetic construct
  misc_feature 1..194: note = scaffold variant
  source 1..194: mol_type = other RNA
tactggcgcttttatctcattactttgagagccatcaccagcgactatgtcgtatgggtaaagcgcttatttatcggagagaaatccgataaataagaagcatcaaagggccggcatggtcccagcctcctcgctggcgccggctgggcaacattccgaggggaccgtcccctcggtaatggcgaatgggaccc

SEQ ID NO: 2172 - RNA, 108 nt, synthetic construct
  misc_feature 1..108: note = scaffold variant
  source 1..108: mol_type = other RNA
tactggcgcctttatctcattactttgagagccatcaccagcgactatgtcgtatgggtaaagcgcaggtgggacgacctctcggtcgtcctatctgaagcatcaaag

SEQ ID NO: 2173 - RNA, 106 nt, synthetic construct
  misc_feature 1..106: note = scaffold variant
  source 1..106: mol_type = other RNA
tactggcgcttttatctcattactttgagagccatcaccagcgactatgtcgtatgggtaaagcgcttatttatcggagaaatccgataaataagaagcatcaaag

SEQ ID NO: 2174 - RNA, 98 nt, synthetic construct
  misc_feature 1..98: note = scaffold variant
  source 1..98: mol_type = other RNA
tactggcgcctttatctcattactttgagagccatcaccagcgactatgtcgtatgggtaaagcgcggacgacctctcggtcgtccgaagcatcaaag

SEQ ID NO: 2175 - RNA, 92 nt, synthetic construct
  misc_feature 1..92: note = scaffold variant
  source 1..92: mol_type = other RNA
tactggcgcttttatctcattactttgagagccatcaccagcgactatgtcgtatgggtaaagcgccggacttcggtccggaagcatcaaag

SEQ ID NO: 2176 - RNA, 108 nt, synthetic construct
  misc_feature 1..108: note = scaffold variant
  source 1..108: mol_type = other RNA
tactggcgcttttatcggattactttgagagccatcaccagcgactatgtcgtatgggtaaagcgcttatttatcggagagaaatccgataaataagaagcatcaaag

SEQ ID NO: 2177 - RNA, 98 nt, synthetic construct
  misc_feature 1..98: note = scaffold variant
  source 1..98: mol_type = other RNA
tactggcgcttttatctcattactttgagagccatcaccagcgactatgtcgtatgggtaaagcgcggacgacctctcggtcgtccgaagcatcaaag

SEQ ID NO: 2178 - RNA, 89 nt, synthetic construct
  misc_feature 1..89: note = scaffold variant
  source 1..89: mol_type = other RNA
gctggcgcttttatctgattactttgagagccatcaccagcgactatgtcgtatgggtaaagcgccctcttcggagggaagcatcaaag

SEQ ID NO: 2179 - RNA, 88 nt, synthetic construct
  misc_feature 1..88: note = scaffold variant
  source 1..88: mol_type = other RNA
gctggcgcctttatctgattactttgagagccatcaccagcgactatgtcgtatgggtaaagctccctcttcggagggagcatcaaag

SEQ ID NO: 2180 - RNA, 197 nt, synthetic construct
  misc_feature 1..197: note = scaffold variant
  source 1..197: mol_type = other RNA
tactggcgcttttatctcattactttgagagccatcaccagcgactatgtcgtatgggtaaagcgcttatttatcggagagaaatccgataaataagaagcatcaaaggggtcggcatggcatctccacctcctcgcggtccgacctgggcatccgaaggaggacgcacgtccactcggatggctaagggagagcca

SEQ ID NO: 2181 - RNA, 88 nt, synthetic construct
  misc_feature 1..88: note = scaffold variant
  source 1..88: mol_type = other RNA
gctggcgcctttatctgattactttgagagccatcaccagcgactatgtcgtatgggtaaagcgccctcttcggagggcgcatcaaag

SEQ ID NO: 2182 - RNA, 186 nt, synthetic construct
  misc_feature 1..186: note = scaffold variant
  source 1..186: mol_type = other RNA
tactggcgcttttatctcattactttgagagccatcaccagcgactatgtcgtatgggtaaagcgcttatttatcggagagaaatccgataaataagaagcatcaaagttttggccggcatggtcccagcctcctcgctggcgccggctgggcaacatgcttcggcatggcgaatgggaccccggg

SEQ ID NO: 2183 - RNA, 97 nt, synthetic construct
  misc_feature 1..97: note = scaffold variant
  source 1..97: mol_type = other RNA
gatggcgcctttatctcattactttgagagccatcaccagcgactatgtcgtatgggtaaagcgcttacggacttcggtccgtaagaagcatcaaag

SEQ ID NO: 2184 - RNA, 89 nt, synthetic construct
  misc_feature 1..89: note = scaffold variant
  source 1..89: mol_type = other RNA
gctggcgcttttatctcattactttgagagccatcaccagcgactatgtcgtatgggtaaagcgccctcttcggagggaagcatcaaag

SEQ ID NO: 2185 - RNA, 96 nt, synthetic construct
  misc_feature 1..96: note = scaffold variant
  source 1..96: mol_type = other RNA
gctggcgcctttatctgattactttgagagccatcaccagcgactatgtcgtatgggtaaagctcttacggacttcggtccgtaagagcatcaaag

SEQ ID NO: 2186 - RNA, 96 nt, synthetic construct
  misc_feature 1..96: note = scaffold variant
  source 1..96: mol_type = other RNA
gctggcgcctttatctgattactttgagagccatcaccagcgactatgtcgtatgggtaaagctcggacgacctctcggtcgtccgagcatcaaag

SEQ ID NO: 2187 - RNA, 160 nt, synthetic construct
  misc_feature 1..160: note = scaffold variant
  source 1..160: mol_type = other RNA
tactggcgcttttatctcattactttgagagccatcaccagcgactatgtcgtatgggtaaagcgcttatttatcggagagaaatccgataaataagaagcatcaaagcctgtcaccggatgtgctttccggtctgatgagtccgtgaggacgaaacagg

SEQ ID NO: 2188 - RNA, 97 nt, synthetic construct
  misc_feature 1..97: note = scaffold variant
  source 1..97: mol_type = other RNA
gctggcgcttttatctgattactttgagagccatcaccagcgactatgtcgtatgggtaaagcgcggacgacctctcggtcgtccgaagcatcaaag

SEQ ID NO: 2189 - RNA, 97 nt, synthetic construct
  misc_feature 1..97: note = scaffold variant
  source 1..97: mol_type = other RNA
gctggcgcctttatctgattactttgagagccatcaccagcgactatgtcgtatgggtaaagcgcggacgacctctcggtcgtccgaagcatcaaag

SEQ ID NO: 2190 - RNA, 106 nt, synthetic construct
  misc_feature 1..106: note = scaffold variant
  source 1..106: mol_type = other RNA
gctggcgcctttatctgattactttgagagccatcaccagcgactatgtcgtatgggtaaagctcaggtgggacgacctctcggtcgtcctatctgagcatcaaag

SEQ ID NO: 2191 - RNA, 177 nt, synthetic construct
  misc_feature 1..177: note = scaffold variant
  source 1..177: mol_type = other RNA
tactggcgcttttatctcattactttgagagccatcaccagcgactatgtcgtatgggtaaagcgcttatttatcggagagaaatccgataaataagaagcatcaaaggatggccggcatggtcccagcctcctcgctggcgccggctgggcaacaccttcgggtggcgaatgggac

SEQ ID NO: 2192 - RNA, 107 nt, synthetic construct
  misc_feature 1..107: note = scaffold variant
  source 1..107: mol_type = other RNA
gctggcgcttttatctgattactttgagagccatcaccagcgactatgtcgtatgggtaaagcgcaggtgggacgacctctcggtcgtcctatctgaagcatcaaag

SEQ ID NO: 2193 - RNA, 109 nt, synthetic construct
  misc_feature 1..109: note = scaffold variant
  source 1..109: mol_type = other RNA
tactggcgcttttatctcattactttgagagccatcaccagcgactatgtcgtactgggtaaagcgcttatttatcggagagaaatccgataaataagaagcatcaaag

SEQ ID NO: 2194 - RNA, 107 nt, synthetic construct
  misc_feature 1..107: note = scaffold variant
  source 1..107: mol_type = other RNA
tactggcgcttttatctcattactttgagagccatcaccagcgactatgtcgtatgggtaaagcgcttatttatcgtgagaaatccgataaataagaagcatcaaag

SEQ ID NO: 2195 - RNA, 109 nt, synthetic construct
  misc_feature 1..109: note = scaffold variant
  source 1..109: mol_type = other RNA
gtactggcgcttttatctcattactttgagagccatcaccagcgactatgtcgtatgggtaaagcgcttatttatcggagagaaatccgataaataagaagcatcaaag

SEQ ID NO: 2196 - RNA, 97 nt, synthetic construct
  misc_feature 1..97: note = scaffold variant
  source 1..97: mol_type = other RNA
gctggcgcttttatctcattactttgagagccatcaccagcgactatgtcgtatgggtaaagcgcggacgacctctcggtcgtccgaagcatcaaag

SEQ ID NO: 2197 - RNA, 97 nt, synthetic construct
  misc_feature 1..97: note = scaffold variant
  source 1..97: mol_type = other RNA
gctggcgcctttatctgattactttgagagccatcaccagcgactatgtcgtatgggtaaagcgcttacggacttcggtccgtaagaagcatcaaag

SEQ ID NO: 2198 - RNA, 107 nt, synthetic construct
  misc_feature 1..107: note = scaffold variant
  source 1..107: mol_type = other RNA
gctggcgcttttatctcattactttgagagccatcaccagcgactatgtcgtatgggtaaagcgcttatttatcggagagaaatccgataaataagaagcatcaaag

SEQ ID NO: 2199 - RNA, 97 nt, synthetic construct
  misc_feature 1..97: note = scaffold variant
  source 1..97: mol_type = other RNA
gctggcgcctttatctcattactttgagagccatcaccagcgactatgtcgtatgggtaaagcgcttacggacttcggtccgtaagaagcatcaaag

SEQ ID NO: 2200 - RNA, 89 nt, synthetic construct
  misc_feature 1..89: note = scaffold variant
  source 1..89: mol_type = other RNA
gctggcgcctttatctgattactttgagagccatcaccagcgactatgtcgtatgggtaaagcgccctcttcggagggaagcatcaaag

SEQ ID NO: 2201 - RNA, 107 nt, synthetic construct
  misc_feature 1..107: note = scaffold variant
  source 1..107: mol_type = other RNA
gctggcgcttttatctcattactttgagagccatcaccagcgactatgtcgtatgggtaaagcgcaggtgggacgacctctcggtcgtcctatctgaagcatcaaag

SEQ ID NO: 2202 - RNA, 107 nt, synthetic construct
  misc_feature 1..107: note = scaffold variant
  source 1..107: mol_type = other RNA
gctggcgcctttatctcattactttgagagccatcaccagcgactatgtcgtatgggtaaagcgcaggtgggacgacctctcggtcgtcctatctgaagcatcaaag

SEQ ID NO: 2203 - RNA, 107 nt, synthetic construct
  misc_feature 1..107: note = scaffold variant
  source 1..107: mol_type = other RNA
gctggcgcctttatctgattactttgagagccatcaccagcgactatgtcgtatgggtaaagcgcaggtgggacgacctctcggtcgtcctatctgaagcatcaaag

SEQ ID NO: 2204 - RNA, 98 nt, synthetic construct
  misc_feature 1..98: note = scaffold variant
  source 1..98: mol_type = other RNA
tactggcgcttttatctgattactttgagagccatcaccagcgactatgtcgtatgggtaaagcgcttacggacttcggtccgtaagaagcatcaaag

SEQ ID NO: 2205 - RNA, 89 nt, synthetic construct
  misc_feature 1..89: note = scaffold variant
  source 1..89: mol_type = other RNA
gctggcgcctttatctcattactttgagagccatcaccagcgactatgtcgtatgggtaaagcgccctcttcggagggaagcatcaaag

SEQ ID NO: 2206 - RNA, 97 nt, synthetic construct
  misc_feature 1..97: note = scaffold variant
  source 1..97: mol_type = other RNA
gctggcgcttttatctcattactttgagagccatcaccagcgactatgtcgtatgggtaaagcgcttacggacttcggtccgtaagaagcatcaaag

SEQ ID NO: 2207 - RNA, 97 nt, synthetic construct
  misc_feature 1..97: note = scaffold variant
  source 1..97: mol_type = other RNA
gctggcgcctttatctcattactttgagagccatcaccagcgactatgtcgtatgggtaaagcgcggacgacctctcggtcgtccgaagcatcaaag

SEQ ID NO: 2208 - RNA, 177 nt, synthetic construct
  misc_feature 1..177: note = scaffold variant
  source 1..177: mol_type = other RNA
gatggccggcatggtcccagcctcctcgctggcgccggctgggcaacaccttcgggtggcgaatgggactactggcgcttttatctcattactttgagagccatcaccagcgactatgtcgtatgggtaaagcgcttatttatcggagagaaatccgataaataagaagcatcaaag

SEQ ID NO: 2209 - RNA, 194 nt, synthetic construct
  misc_feature 1..194: note = scaffold variant
  source 1..194: mol_type = other RNA
ggccggcatggtcccagcctcctcgctggcgccggctgggcaacattccgaggggaccgtcccctcggtaatggcgaatgggaccctactggcgcttttatctcattactttgagagccatcaccagcgactatgtcgtatgggtaaagcgcttatttatcggagagaaatccgataaataagaagcatcaaag

SEQ ID NO: 2210 - RNA, 96 nt, synthetic construct
  misc_feature 1..96: note = scaffold variant
  source 1..96: mol_type = other RNA
gctggcgcctttatctgattactttgagagccatcaccagcgactatgtcgtatgggtaaagcgcttacggacttcggtccgtaagcgcatcaaag

SEQ ID NO: 2211 - RNA, 172 nt, synthetic construct
  misc_feature 1..172: note = scaffold variant
  source 1..172: mol_type = other RNA
cgtggttagggccacgttaaatagttgcttaagccctaagcgttgatcttcggatcaggtgcaatactggcgcttttatctcattactttgagagccatcaccagcgactatgtcgtatgggtaaagcgcttatttatcggagagaaatccgataaataagaagcatcaaag

SEQ ID NO: 2212 - RNA, 197 nt, synthetic construct
  misc_feature 1..197: note = scaffold variant
  source 1..197: mol_type = other RNA
gggtcggcatggcatctccacctcctcgcggtccgacctgggcatccgaaggaggacgcacgtccactcggatggctaagggagagccatactggcgcttttatctcattactttgagagccatcaccagcgactatgtcgtatgggtaaagcgcttatttatcggagagaaatccgataaataagaagcatcaaag

SEQ ID NO: 2213 - RNA, 171 nt, synthetic construct
  misc_feature 1..171: note = scaffold variant
  source 1..171: mol_type = other RNA
tactggcgcttttatctcattactttgagagccatcaccagcgactatgtcgtatgggtaaagcgcttatttatcggagagaaatccgataaataagaagcatcaaagccagtactgatgagtccgtgaggacgaaacgagtaagctcgtctactggcgcttttatctcat

SEQ ID NO: 2214 - RNA, 99 nt, synthetic construct
  misc_feature 1..99: note = scaffold variant
  source 1..99: mol_type = other RNA
tactggcgcctttatctcattactttagagagccatcaccagcgactatgtcgtatgggtaaagcgcttacggacttcggtccgtaagaagcatcaaag

SEQ ID NO: 2215 - RNA, 157 nt, synthetic construct
  misc_feature 1..157: note = scaffold variant
  source 1..157: mol_type = other RNA
cgactactgatgagtccgtgaggacgaaacgagtaagctcgtctagtcgtactggcgcttttatctcattactttgagagccatcaccagcgactatgtcgtatgggtaaagcgcttatttatcggagagaaatccgataaataagaagcatcaaag

SEQ ID NO: 2216 - RNA, 106 nt, synthetic construct
  misc_feature 1..106: note = scaffold variant
  source 1..106: mol_type = other RNA
gctggcgcctttatctgattactttgagagccatcaccagcgactatgtcgtatgggtaaagcgcaggtgggacgacctctcggtcgtcctatctgcgcatcaaag

SEQ ID NO: 2217 - RNA, 97 nt, synthetic construct
  misc_feature 1..97: note = scaffold variant
  source 1..97: mol_type = other RNA
tactggcgcctttatctcattactttagagccatcaccagcgactatgtcgtatgggtaaagcgcttacggacttcggtccgtaagaagcatcaaag

SEQ ID NO: 2218 - RNA, 186 nt, synthetic construct
  misc_feature 1..186: note = scaffold variant
  source 1..186: mol_type = other RNA
tactggcgcttttatctcattactttgagagccatcaccagcgactatgtcgtatgggtaaagcgcttatttatcggagagaaatccgataaataagaagcatcaaagcattcctcagaaaatgacaaacctgtggggcgtaagtagatcttcggatctatgatcgtgcagacgttaaaatcaggt

SEQ ID NO: 2219 - RNA, 171 nt, synthetic construct
  misc_feature 1..171: note = scaffold variant
  source 1..171: mol_type = other RNA
tactggcgcttttatctcattactttgagagccatcaccagcgactatgtcgtatgggtaaagcgcttatttatcggagagaaatccgataaataagaagcatcaaagcgactactgatgagtccgtgaggacgaaacgagtaagctcgtctagtcgcgtgtagcgaagca

SEQ ID NO: 2220 - RNA, 186 nt, synthetic construct
  misc_feature 1..186: note = scaffold variant
  source 1..186: mol_type = other RNA
cattcctcagaaaatgacaaacctgtggggcgtaagtagatcttcggatctatgatcgtgcagacgttaaaatcaggttactggcgcttttatctcattactttgagagccatcaccagcgactatgtcgtatgggtaaagcgcttatttatcggagagaaatccgataaataagaagcatcaaag

SEQ ID NO: 2221 - RNA, 186 nt, synthetic construct
  misc_feature 1..186: note = scaffold variant
  source 1..186: mol_type = other RNA
ttttggccggcatggtcccagcctcctcgctggcgccggctgggcaacatgcttcggcatggcgaatgggaccccgggtactggcgcttttatctcattactttgagagccatcaccagcgactatgtcgtatgggtaaagcgcttatttatcggagagaaatccgataaataagaagcatcaaag

SEQ ID NO: 2222 - RNA, 171 nt, synthetic construct
  misc_feature 1..171: note = scaffold variant
  source 1..171: mol_type = other RNA
cgactactgatgagtccgtgaggacgaaacgagtaagctcgtctagtcgcgtgtagcgaagcatactggcgcttttatctcattactttgagagccatcaccagcgactatgtcgtatgggtaaagcgcttatttatcggagagaaatccgataaataagaagcatcaaag

SEQ ID NO: 2223 - RNA, 168 nt, synthetic construct
  misc_feature 1..168: note = scaffold variant
  source 1..168: mol_type = other RNA
tactggcgcttttatctcattactttgagagccatcaccagcgactatgtcgtatgggtaaagcgcttatttatcggagagaaatccgataaataagaagcatcaaaggggagccccgctgatgaggtcggggagaccgaaagggacttcggtccctacggggctccc

SEQ ID NO: 2224 - RNA, 144 nt, synthetic construct
  misc_feature 1..144: note = scaffold variant
  source 1..144: mol_type = other RNA
ccacccccaccaccacccccacccccaccaccaccctactggcgcttttatctcattactttgagagccatcaccagcgactatgtcgtatgggtaaagcgcttatttatcggagagaaatccgataaataagaagcatcaaag

SEQ ID NO: 2225 - RNA, 157 nt, synthetic construct
  misc_feature 1..157: note = scaffold variant
  source 1..157: mol_type = other RNA
tactggcgcttttatctcattactttgagagccatcaccagcgactatgtcgtatgggtaaagcgcttatttatcggagagaaatccgataaataagaagcatcaaagcgactactgatgagtccgtgaggacgaaacgagtaagctcgtctagtcg

SEQ ID NO: 2226 - RNA, 172 nt, synthetic construct
  misc_feature 1..172: note = scaffold variant
  source 1..172: mol_type = other RNA
tactggcgcttttatctcattactttgagagccatcaccagcgactatgtcgtatgggtaaagcgcttatttatcggagagaaatccgataaataagaagcatcaaagcgtggttagggccacgttaaatagttgcttaagccctaagcgttgatcttcggatcaggtgcaa

SEQ ID NO: 2227 - RNA, 184 nt, synthetic construct
  misc_feature 1..184: note = scaffold variant
  source 1..184: mol_type = other RNA
tactggcgcttttatctcattactttgagagccatcaccagcgactatgtcgtatgggtaaagcgcttatttatcggagagaaatccgataaataagaagcatcaaagggcaataaagcggttacaagcccgcaaaaatagcagagtaatgtcgcgatagcgcggcattaatgcagctttattg

SEQ ID NO: 2228 - RNA, 122 nt, synthetic construct
  misc_feature 1..122: note = scaffold variant
  source 1..122: mol_type = other RNA
tactggcgcttttatctcattactattatctcattactttgagagccatcaccagcgactatgtcgtatgggtaaagcgcttatttatcggagagaaatccgataaataagaagcatcaaag

SEQ ID NO: 2229 - RNA, 184 nt, synthetic construct
  misc_feature 1..184: note = scaffold variant
  source 1..184: mol_type = other RNA
ggcaataaagcggttacaagcccgcaaaaatagcagagtaatgtcgcgatagcgcggcattaatgcagctttattgtactggcgcttttatctcattactttgagagccatcaccagcgactatgtcgtatgggtaaagcgcttatttatcggagagaaatccgataaataagaagcatcaaag

SEQ ID NO: 2230 - RNA, 185 nt, synthetic construct
  misc_feature 1..185: note = scaffold variant
  source 1..185: mol_type = other RNA
tactggcgcttttatctcattactttgagagccatcaccagcgactatgtcgtatgggtaaagcgcttatttatcggagagaaatccgataaataagaagcatcaaagacccgcaaggccgacggcatccgccgccgctggtgcaagtccagccgccccttcgggggcgggcgctcatgggtaac

SEQ ID NO: 2231 - RNA, 63 nt, synthetic construct
  misc_feature 1..63: note = scaffold variant
  source 1..63: mol_type = other RNA
tactggcgcttttatctcattactttgagagccatcaccagcgactatgtcgtatgggtaaag

SEQ ID NO: 2232 - RNA, 168 nt, synthetic construct
  misc_feature 1..168: note = scaffold variant
  source 1..168: mol_type = other RNA
gggagccccgctgatgaggtcggggagaccgaaagggacttcggtccctacggggctccctactggcgcttttatctcattactttgagagccatcaccagcgactatgtcgtatgggtaaagcgcttatttatcggagagaaatccgataaataagaagcatcaaag

SEQ ID NO: 2233 - RNA, 171 nt, synthetic construct
  misc_feature 1..171: note = scaffold variant
  source 1..171: mol_type = other RNA
ccagtactgatgagtccgtgaggacgaaacgagtaagctcgtctactggcgcttttatctcattactggcgcttttatctcattactttgagagccatcaccagcgactatgtcgtatgggtaaagcgcttatttatcggagagaaatccgataaataagaagcatcaaag

SEQ ID NO: 2234 - RNA, 185 nt, synthetic construct
  misc_feature 1..185: note = scaffold variant
  source 1..185: mol_type = other RNA
acccgcaaggccgacggcatccgccgccgctggtgcaagtccagccgccccttcgggggcgggcgctcatgggtaactactggcgcttttatctcattactttgagagccatcaccagcgactatgtcgtatgggtaaagcgcttatttatcggagagaaatccgataaataagaagcatcaaag

SEQ ID NO: 2235 - RNA, 160 nt, synthetic construct
  misc_feature 1..160: note = scaffold variant
  source 1..160: mol_type = other RNA
cctgtcaccggatgtgctttccggtctgatgagtccgtgaggacgaaacaggtactggcgcttttatctcattactttgagagccatcaccagcgactatgtcgtatgggtaaagcgcttatttatcggagagaaatccgataaataagaagcatcaaag

SEQ ID NO: 2236 - RNA, 100 nt, synthetic construct
  misc_feature 1..100: note = scaffold variant
  source 1..100: mol_type = other RNA
gtactggcgcctttatctcattactttgagagccatcaccagcgactatgtcgtagtgggtaaagcgcttacggacttcggtccgtaagaagcatcaaag

SEQ ID NO: 2237 - RNA, 91 nt, synthetic construct
  misc_feature 1..91: note = scaffold variant
  source 1..91: mol_type = other RNA
gtactggcgcttttatctgattactttgagagccatcaccagcgactatgtcgtagtgggtaaagctccctcttcggagggagcatcaaag

SEQ ID NO: 2238 - RNA, 89 nt, synthetic construct
  misc_feature 1..89: note = scaffold variant
  source 1..89: mol_type = other RNA
actggcgcttttatctgattactttgagagccatcaccagcgactatgtcgtagtgggtaaagctccctcttcggagggagcatcaaag

SEQ ID NO: 2239 - RNA, 97 nt, synthetic construct
  misc_feature 1..97: note = scaffold variant
  source 1..97: mol_type = other RNA
actggcgcctttatctcattactttgagagccatcaccagcgactatgtcgtatgggtaaagcgcttacggacttcggtccgtaagaagcatcaaag

SEQ ID NO: 2240 - RNA, 89 nt, synthetic construct
  misc_feature 1..89: note = scaffold variant
  source 1..89: mol_type = other RNA
gctggcgcttttatctgattactttgagagccatcaccagcgactatgtcgtagtgggtaaagctccctcttcggagggagcatcaaag

SEQ ID NO: 2241 - RNA, 88 nt, synthetic construct
  misc_feature 1..88: note = scaffold variant
  source 1..88: mol_type = other RNA
actggcgcttttatctgattactttgagagccatcaccagcgactatgtcgtatgggtaaagctccctcttcggagggagcatcaaag

SEQ ID NO: 2242 - RNA, 97 nt, synthetic construct
  misc_feature 1..97: note = scaffold variant
  source 1..97: mol_type = other RNA
actggcgcctttatctgattactttgagagccatcaccagcgactatgtcgtatgggtaaagcgcttacggacttcggtccgtaagaagcatcaaag

SEQ ID NO: 2243 - RNA, 97 nt, synthetic construct
  misc_feature 1..97: note = scaffold variant
  source 1..97: mol_type = other RNA
actggcgcttttatctgattactttgagagccatcaccagcgactatgtcgtatgggtaaagcgcttacggacttcggtccgtaagaagcatcaaag

SEQ ID NO: 2244 - RNA, 98 nt, synthetic construct
  misc_feature 1..98: note = scaffold variant
  source 1..98: mol_type = other RNA
actggcgcttttatctgattactttgagagccatcaccagcgactatgtcgtagtgggtaaagcgcttacggacttcggtccgtaagaagcatcaaag

SEQ ID NO: 2245 - RNA, 89 nt, synthetic construct
  misc_feature 1..89: note = scaffold variant
  source 1..89: mol_type = other RNA
actggcgcttttatctgattactttgagagccatcaccagcgactatgtcgtattgggtaaagctccctcttcggagggagcatcaaag

SEQ ID NO: 2246 - RNA, 98 nt, synthetic construct
  misc_feature 1..98: note = scaffold variant
  source 1..98: mol_type = other RNA
actggcgcttttatctgattactttgagagccatcaccagcgactatgtcgtattgggtaaagcgcttacggacttcggtccgtaagaagcatcaaag

SEQ ID NO: 2247 - RNA, 98 nt, synthetic construct
  misc_feature 1..98: note = scaffold variant
  source 1..98: mol_type = other RNA
actggcgcctttatcatcattactttgagagccatcaccagcgactatgtcgtatgggtaaagcgcttacggacttcggtccgtaagaagcatcaaag

SEQ ID NO: 2248 - RNA, 90 nt, synthetic construct
  misc_feature 1..90: note = scaffold variant
  source 1..90: mol_type = other RNA
actggcgcttttatctgattactttgagagccatcaccagcgactatgtcgtagtgggtaaagcgccctcttcggagggaagcatcaaag

SEQ ID NO: 2249 - RNA, 96 nt, synthetic construct
  misc_feature 1..96: note = scaffold variant
  source 1..96: mol_type = other RNA
actggcgcttttatctgattactttgagagccatcaccagcgactatgtcgtagtgggtaaagctcacatgaggatcacccatgtgagcatcaaag

SEQ ID NO: 2250 - RNA, 89 nt, synthetic construct
  misc_feature 1..89: note = scaffold variant
  source 1..89: mol_type = other RNA
actggcacttttacctgattactttgagagccaacaccagcgactatgtcgtagtgggtaaagctccctcttcggagggagcatcaaag

SEQ ID NO: 2251 - RNA, 89 nt, synthetic construct
  misc_feature 1..89: note = scaffold variant
  source 1..89: mol_type = other RNA
actggcacttttatctgattactttgagagccatcaccagcgactatgtcgtagtgggtaaagctccctcttcggagggagcatcaaag

SEQ ID NO: 2252 - RNA, 89 nt, synthetic construct
  misc_feature 1..89: note = scaffold variant
  source 1..89: mol_type = other RNA
actggcccttttatctgattactttgagagccatcaccagcgactatgtcgtagtgggtaaagctccctcttcggagggagcatcaaag

SEQ ID NO: 2253 - RNA, 89 nt, synthetic construct
  misc_feature 1..89: note = scaffold variant
  source 1..89: mol_type = other RNA
actggcgcttttacctgattactttgagagccatcaccagcgactatgtcgtagtgggtaaagctccctcttcggagggagcatcaaag

SEQ ID NO: 2254 - RNA, 89 nt, synthetic construct
  misc_feature 1..89: note = scaffold variant
  source 1..89: mol_type = other RNA
actggcgcttttatctgattactttgagagccaacaccagcgactatgtcgtagtgggtaaagctccctcttcggagggagcatcaaag

SEQ ID NO: 2255 - RNA, 97 nt, synthetic construct
  misc_feature 1..97: note = scaffold variant
  source 1..97: mol_type = other RNA
actggcacctttacctgattactttgagagccaacaccagcgactatgtcgtatgggtaaagcgcttacggacttcggtccgtaagaagcatcaaag

SEQ ID NO: 2256 - RNA, 97 nt, synthetic construct
  misc_feature 1..97: note = scaffold variant
  source 1..97: mol_type = other RNA
actggcacctttatctgattactttgagagccatcaccagcgactatgtcgtatgggtaaagcgcttacggacttcggtccgtaagaagcatcaaag

SEQ ID NO: 2257 - RNA, 97 nt, synthetic construct
  misc_feature 1..97: note = scaffold variant
  source 1..97: mol_type = other RNA
actggcccctttatctgattactttgagagccatcaccagcgactatgtcgtatgggtaaagcgcttacggacttcggtccgtaagaagcatcaaag

SEQ ID NO: 2258 - RNA, 97 nt, synthetic construct
  misc_feature 1..97: note = scaffold variant
  source 1..97: mol_type = other RNA
actggcgcctttatctgattactttgagagccaacaccagcgactatgtcgtatgggtaaagcgcttacggacttcggtccgtaagaagcatcaaag

SEQ ID NO: 2259 - RNA, 89 nt, synthetic construct; identical to SEQ ID NO: 2240
  misc_feature 1..89: note = scaffold variant
  source 1..89: mol_type = other RNA

SEQ ID NO: 2260 - RNA, 90 nt, synthetic construct
  misc_feature 1..90: note = scaffold variant
  source 1..90: mol_type = other RNA
gactggcgcttttatctgattactttgagagccatcaccagcgactatgtcgtagtgggtaaagctccctcttcggagggagcatcaaag

SEQ ID NO: 2261 - RNA, 90 nt, synthetic construct
  misc_feature 1..90: note = scaffold variant
  source 1..90: mol_type = other RNA
actggcgcctttatctgattactttggagagccatcaccagcgactatgtcgtagtgggtaaagctccctcttcggagggagcatcaaag

SEQ ID NO: 2262 - RNA, 89 nt, synthetic construct
  misc_feature 1..89: note = scaffold variant
  source 1..89: mol_type = other RNA
actggcgcatttatctgattactttgtgagccatcaccagcgactatgtcgtagtgggtaaagctccctcttcggagggagcatcaaag

SEQ ID NO: 2263 - RNA, 89 nt, synthetic construct
  misc_feature 1..89: note = scaffold variant
  source 1..89: mol_type = other RNA
actggcgcctttatctgattactttgagagccatcaccagcgactatgtcgtagtgggtaaagctccctcttcggagggagcatcaaag

SEQ ID NO: 2264 - RNA, 90 nt, synthetic construct
  misc_feature 1..90: note = scaffold variant
  source 1..90: mol_type = other RNA
actggcgcttttatctgattactttggagagccatcaccagcgactatgtcgtagtgggtaaagctccctcttcggagggagcatcaaag

SEQ ID NO: 2265 - RNA, 89 nt, synthetic construct
  misc_feature 1..89: note = scaffold variant
  source 1..89: mol_type = other RNA
actggcgcatttatctgattactttgagagccatcaccagcgactatgtcgtagtgggtaaagctccctcttcggagggagcatcaaag

SEQ ID NO: 2266 - RNA, 89 nt, synthetic construct
  misc_feature 1..89: note = scaffold variant
  source 1..89: mol_type = other RNA
actggcgcttttatctgattactttgtgagccatcaccagcgactatgtcgtagtgggtaaagctccctcttcggagggagcatcaaag

SEQ ID NO: 2267 - RNA, 90 nt, synthetic construct
  misc_feature 1..90: note = scaffold variant
  source 1..90: mol_type = other RNA
actggcgcttttattctgattactttgagagccatcaccagcgactatgtcgtagtgggtaaagctccctcttcggagggagcatcaaag

SEQ ID NO: 2268 - RNA, 88 nt, synthetic construct
  misc_feature 1..88: note = scaffold variant
  source 1..88: mol_type = other RNA
acggcgcttttatctgattactttgagagccatcaccagcgactatgtcgtagtgggtaaagctccctcttcggagggagcatcaaag

SEQ ID NO: 2269 - RNA, 89 nt, synthetic construct
  misc_feature 1..89: note = scaffold variant
  source 1..89: mol_type = other RNA
actggcgcttttatatgattactttgagagccatcaccagcgactatgtcgtagtgggtaaagctccctcttcggagggagcatcaaag

SEQ ID NO: 2270 - RNA, 90 nt, synthetic construct
  misc_feature 1..90: note = scaffold variant
  source 1..90: mol_type = other RNA
actggcgcttttatcttgattactttgagagccatcaccagcgactatgtcgtagtgggtaaagctccctcttcggagggagcatcaaag

SEQ ID NO: 2271 - RNA, 89 nt, synthetic construct
  misc_feature 1..89: note = scaffold variant
  source 1..89: mol_type = other RNA
actggcgcttttatctgattactttgagagccagcaccagcgactatgtcgtagtgggtaaagctccctcttcggagggagcatcaaag

SEQ ID NO: 2272 - RNA, 89 nt, synthetic construct
  misc_feature 1..89: note = scaffold variant
  source 1..89: mol_type = other RNA
actggcgctgttatctgattacttcgagagccatcaccagcgactatgtcgtagtgggtaaagctccctcttcggagggagcatcgaag

SEQ ID NO: 2273 - RNA, 89 nt, synthetic construct
  misc_feature 1..89: note = scaffold variant
  source 1..89: mol_type = other RNA
actggcgctcttatctgattacttcgagagccatcaccagcgactatgtcgtagtgggtaaagctccctcttcggagggagcatcgaag

SEQ ID NO: 2274 - RNA, 89 nt, synthetic construct
  misc_feature 1..89: note = scaffold variant
  source 1..89: mol_type = other RNA
actggcgcttgtatctgattactctgagagccatcaccagcgactatgtcgtagtgggtaaagctccctcttcggagggagcatcagag

SEQ ID NO: 2275 - RNA, 89 nt, synthetic construct
  misc_feature 1..89: note = scaffold variant
  source 1..89: mol_type = other RNA
actggcgcttctatctgattactctgagagccatcaccagcgactatgtcgtagtgggtaaagctccctcttcggagggagcatcagag

SEQ ID NO: 2276 - RNA, 89 nt, synthetic construct
  misc_feature 1..89: note = scaffold variant
  source 1..89: mol_type = other RNA
actggcgctttgatctgattaccttgagagccatcaccagcgactatgtcgtagtgggtaaagctccctcttcggagggagcatcaagg

SEQ ID NO: 2277 - RNA, 89 nt, synthetic construct
  misc_feature 1..89: note = scaffold variant
  source 1..89: mol_type = other RNA
actggcgctttcatctgattaccttgagagccatcaccagcgactatgtcgtagtgggtaaagctccctcttcggagggagcatcaagg

SEQ ID NO: 2278 - RNA, 89 nt, synthetic construct
  misc_feature 1..89: note = scaffold variant
  source 1..89: mol_type = other RNA
actggcgctgttatctgattactttgagagccatcaccagcgactatgtcgtagtgggtaaagctccctcttcggagggagcatcaaag

SEQ ID NO: 2279 - RNA, 89 nt, synthetic construct
  misc_feature 1..89: note = scaffold variant
  source 1..89: mol_type = other RNA
actggcgcttttatctgattactttgagagccatcaccagcgactatgtcgtagtgggtaaagctccctcttcggagggagcatcgaag

SEQ ID NO: 2280 - RNA, 89 nt, synthetic construct
  misc_feature 1..89: note = scaffold variant
  source 1..89: mol_type = other RNA
actggcgcttttatctgattacttcgagagccatcaccagcgactatgtcgtagtgggtaaagctccctcttcggagggagcatcaaag

SEQ ID NO: 2281 - RNA, 98 nt, synthetic construct
  misc_feature 1..98: note = scaffold variant
  source 1..98: mol_type = other RNA
actggcacttctatctgattactctgagagccatcaccagcgactatgtcgtatgggtaaagccgcttacggacttcggtccgtaagaggcatcagag

SEQ ID NO: 2282 - RNA, 89 nt, synthetic construct
  misc_feature 1..89: note = scaffold variant
  source 1..89: mol_type = other RNA
actggcacttctatctgattactctgagagccatcaccagcgactatgtcgtagtgggtaaagctccctcttcggagggagcatcagag

SEQ ID NO: 2283 - RNA, 98 nt, synthetic construct
  misc_feature 1..98: note = scaffold variant
  source 1..98: mol_type = other RNA
actggcacctttatctgattactttgagagccatcaccagcgactatgtcgtatgggtaaagccgcttacggacttcggtccgtaagaggcatcaaag

SEQ ID NO: 2284 - RNA, 98 nt, synthetic construct
  misc_feature 1..98: note = scaffold variant
  source 1..98: mol_type = other RNA
actggcacttgtatctgattactctgagagccatcaccagcgactatgtcgtatgggtaaagccgcttacggacttcggtccgtaagaggcatcagag

SEQ ID NO: 2285 - RNA, 89 nt, synthetic construct
  misc_feature 1..89: note = scaffold variant
  source 1..89: mol_type = other RNA
actggcacttgtatctgattactctgagagccatcaccagcgactatgtcgtagtgggtaaagctccctcttcggagggagcatcagag

SEQ ID NO: 2286 - RNA, 97 nt, synthetic construct
  misc_feature 1..97: note = scaffold variant
  source 1..97: mol_type = other RNA
actggcacttttatctgattactttgagagccatcaccagcgactatgtcgtatgggtaaagcgcttacggacttcggtccgtaagaagcatcaaag

SEQ ID NO: 2287 - RNA, 97 nt, synthetic construct
  misc_feature 1..97: note = scaffold variant
  source 1..97: mol_type = other RNA
actggcacttctatctgattactctgagagccatcaccagcgactatgtcgtatgggtaaagcgcttacggacttcggtccgtaagaagcatcagag

SEQ ID NO: 2288 - RNA, 98 nt, synthetic construct
  misc_feature 1..98: note = scaffold variant
  source 1..98: mol_type = other RNA
actggcgcttctatctgattactctgagagccatcaccagcgactatgtcgtatgggtaaagccgcttacggacttcggtccgtaagaggcatcagag

SEQ ID NO: 2289 - RNA, 98 nt, synthetic construct
  misc_feature 1..98: note = scaffold variant
  source 1..98: mol_type = other RNA
actggcacttctatctgattactctgagcgccatcaccagcgactatgtcgtatgggtaaagccgcttacggacttcggtccgtaagaggcatcagag

SEQ ID NO: 2290 - RNA, 98 nt, synthetic construct
  misc_feature 1..98: note = scaffold variant
  source 1..98: mol_type = other RNA
actggcgcttctatctgattactctgagcgccatcaccagcgactatgtcgtatgggtaaagccgcttacggacttcggtccgtaagaggcatcagag

SEQ ID NO: 2291 - RNA, 98 nt, synthetic construct
  misc_feature 1..98: note = scaffold variant
  source 1..98: mol_type = other RNA
actggcgcttctatctgattactctgagcgccatcaccagcgactatgtcgtatgggtaaagcgccttacggacttcggtccgtaaggagcatcagag

SEQ ID NO: 2292 - RNA, 99 nt, synthetic construct; identical to SEQ ID NO: 1067
  misc_feature 1..99: note = scaffold variant
  source 1..99: mol_type = other RNA

SEQ ID NO: 2293 - RNA, 98 nt, synthetic construct
  misc_feature 1..98: note = scaffold variant
  source 1..98: mol_type = other RNA
acgggactttctatctgattactctgaagtccctcaccagcgactatgtcgtatgggtaaagccgcttacggacttcggtccgtaagaggcatcagag

SEQ ID NO: 2294 - RNA, 98 nt, synthetic construct
  misc_feature 1..98: note = scaffold variant
  source 1..98: mol_type = other RNA
acctgtagttctatctgattactctgactacagtcaccagcgactatgtcgtatgggtaaagccgcttacggacttcggtccgtaagaggcatcagag

SEQ ID NO: 2295 - RNA, 113 nt, synthetic construct
  misc_feature 1..113: note = scaffold variant
  source 1..113: mol_type = other RNA
actggcgcttttatctgattactttgagagccatcaccagcgactatgtcgtagtgggtaaagctgcacggtgggcgcagcttcggctgacggtacaccgtgcagcatcaaag

SEQ ID NO: 2296 - RNA, 143 nt, synthetic construct
  misc_feature 1..143: note = scaffold variant
  source 1..143: mol_type = other RNA
actggcgcttttatctgattactttgagagccatcaccagcgactatgtcgtagtgggtaaagctgcacggtgggcgcagcttcggctgacggtacaccggtgggcgcagcttcggctgacggtacaccgtgcagcatcaaag

SEQ ID NO: 2297 - RNA, 173 nt, synthetic construct
  misc_feature 1..173: note = scaffold variant
  source 1..173: mol_type = other RNA
actggcgcttttatctgattactttgagagccatcaccagcgactatgtcgtagtgggtaaagctgcacggtgggcgcagcttcggctgacggtacaccggtgggcgcagcttcggctgacggtacaccggtgggcgcagcttcggctgacggtacaccgtgcagcatcaaag

SEQ ID NO: 2298 - RNA, 203 nt, synthetic construct
  misc_feature 1..203: note = scaffold variant
  source 1..203: mol_type = other RNA
actggcgcttttatctgattactttgagagccatcaccagcgactatgtcgtagtgggtaaagctgcacggtgggcgcagcttcggctgacggtacaccggtgggcgcagcttcggctgacggtacaccggtgggcgcagcttcggctgacggtacaccggtgggcgcagcttcggctgacggtacaccgtgcagcatcaaag

SEQ ID NO: 2299 - RNA, 233 nt, synthetic construct
  misc_feature 1..233: note = scaffold variant
  source 1..233: mol_type = other RNA
actggcgcttttatctgattactttgagagccatcaccagcgactatgtcgtagtgggtaaagctgcacggtgggcgcagcttcggctgacggtacaccggtgggcgcagcttcggctgacggtacaccggtgggcgcagcttcggctgacggtacaccggtgggcgcagcttcggctgacggtacaccggtgggcgcagcttcggctgacggtacaccgtgcagcatcaaag

SEQ ID NO: 2300 - RNA, 97 nt, synthetic construct
  misc_feature 1..97: note = scaffold variant
  source 1..97: mol_type = other RNA
actggcgcttttatctgattactttgagagccatcaccagcgactatgtcgtagtgggtaaagctgcacctagcggaggctaggtgcagcatcaaag

SEQ ID NO: 2301 - RNA, 118 nt, synthetic construct
  misc_feature 1..118: note = scaffold variant
  source 1..118: mol_type = other RNA
actggcgcttttatctgattactttgagagccatcaccagcgactatgtcgtagtgggtaaagctgcacctcggcttgctgaagcgcgcacggcaagaggcgaggtgcagcatcaaag

SEQ ID NO: 2302 - RNA, 192 nt, synthetic construct
  misc_feature 1..192: note = scaffold variant
  source 1..192: mol_type = other RNA
actggcgcttttatctgattactttgagagccatcaccagcgactatgtcgtagtgggtaaagctgcacctctctcgacgcaggactcggcttgctgaagcgcgcacggcaagaggcgaggggcggcgactggtgagtacgccaaaaattttgactagcggaggctagaaggagagaggtgcagcatcaaag

SEQ ID NO: 2303 - RNA, 156 nt, synthetic construct
  misc_feature 1..156: note = scaffold variant
  source 1..156: mol_type = other RNA
actggcgcttttatctgattactttgagagccatcaccagcgactatgtcgtagtgggtaaagctgcacggtgcccgtctgttgtgtcgagagacgccaaaaattttgactagcggaggctagaaggagagagatgggtgccgtgcagcatcaaag

SEQ ID NO: 2304 - RNA, 96 nt, synthetic construct
  misc_feature 1..96: note = scaffold variant
  source 1..96: mol_type = other RNA
actggcgcttttatctgattactttgagagccatcaccagcgactatgtcgtagtgggtaaagctgcacatggagaggagatgtgcagcatcaaag

SEQ ID NO: 2305 - RNA, 91 nt, synthetic construct
  misc_feature 1..91: note = scaffold variant
  source 1..91: mol_type = other RNA
actggcgcttttatctgattactttgagagccatcaccagcgactatgtcgtagtgggtaaagctgcacatggagatgtgcagcatcaaag

SEQ ID NO: 2306 - RNA, 106 nt, synthetic construct
  misc_feature 1..106: note = scaffold variant
  source 1..106: mol_type = other RNA
actggcgcttttatctgattactttgagagccatcaccagcgactatgtcgtagtgggtaaagcttgggcgcagcgtcaatgacgctgacggtacaagcatcaaag

SEQ ID NO: 2307 - RNA, 145 nt, synthetic construct
  misc_feature 1..145: note = scaffold variant
  source 1..145: mol_type = other RNA
actggcgcttttatctgattactttgagagccatcaccagcgactatgtcgtagtgggtaaagctgcactatgggcgcagcgtcaatgacgctgacggtacaggccacatgaggatcacccatgtggtatagtgcagcatcaaag

SEQ ID NO: 2308 - RNA, 155 nt, synthetic construct
  misc_feature 1..155: note = scaffold variant
  source 1..155: mol_type = other RNA
actggcgcttttatctgattactttgagagccatcaccagcgactatgtcgtagtgggtaaagctgcactatgggcgcagctcatgaggatcacccatgagctgacggtacaggccacatgaggatcacccatgtggtatagtgcagcatcaaag

SEQ ID NO: 2309 - RNA, 151 nt, synthetic construct
  misc_feature 1..151: note = scaffold variant
  source 1..151: mol_type = other RNA
actggcgcttttatctgattactttgagagccatcaccagcgactatgtcgtagtgggtaaagctgcactatgggcgcagcgtcaatgacgctgacggtacaggccacatggcagtcgtaacgacgcgggtggtatagtgcagcatcaaag

SEQ ID NO: 2310 - RNA, 172 nt, synthetic construct
  misc_feature 1..172: note = scaffold variant
  source 1..172: mol_type = other RNA
actggcgcttttatctgattactttgagagccatcaccagcgactatgtcgtagtgggtaaagctgcactatgggcgcagcaaacatggcagtcctaaggacgcgggttttgctgacggtacaggccacatggcagtcgtaacgacgcgggtggtatagtgcagcatcaaag

SEQ ID NO: 2311 - RNA, 159 nt, synthetic construct
  misc_feature 1..159: note = scaffold variant
  source 1..159: mol_type = other RNA
actggcgcttttatctgattactttgagagccatcaccagcgactatgtcgtagtgggtaaagctgcactatgggcgcagacatggcagtcgtaacgacgcgggtctgacggtacaggccacatgaggatcacccatgtggtatagtgcagcatcaaag

SEQ ID NO: 2312 - RNA, 108 nt, synthetic construct
  misc_feature 1..108: note = scaffold variant
  source 1..108: mol_type = other RNA
actggcgcttttatctgattactttgagagccatcaccagcgactatgtcgtagtgggtaaagctgcactaaggagtttatatggaaacccttagtgcagcatcaaag

SEQ ID NO: 2313 - RNA, 242 nt, synthetic construct
  misc_feature 1..242: note = scaffold variant
  source 1..242: mol_type = other RNA
actggcgcttttatctgattactttgagagccatcaccagcgactatgtcgtagtgggtaaagctcaggaagcactatgggcgcagcgtcaatgacgctgacggtacaggccagacaattattgtctggtatagtgcagcagcagaacaatttgctgagggctattgaggcgcaacagcatctgttgcaactcacagtctggggcatcaagcagctccaggcaagaatcctgagcatcaaag

SEQ ID NO: 2314 - RNA, 98 nt, synthetic construct
  misc_feature 1..98: note = scaffold variant
  source 1..98: mol_type = other RNA
actggcgcttttatctgattactttgagagccatcaccagcgactatgtcgtagtgggtaaagctgcacgccctgaagaagggcgtgcagcatcaaag

SEQ ID NO: 2315 - RNA, 111 nt, synthetic construct
  misc_feature 1..111: note = scaffold variant
  source 1..111: mol_type = other RNA
actggcgcttttatctgattactttgagagccatcaccagcgactatgtcgtagtgggtaaagctgcacggctcgtgtagctcattagctccgagccgtgcagcatcaaag

SEQ ID NO: 2316 - RNA, 113 nt, synthetic construct
  misc_feature 1..113: note = scaffold variant
  source 1..113: mol_type = other RNA
actggcgcttttatctgattactttgagagccatcaccagcgactatgtcgtagtgggtaaagctgcacccgtgtgcatccgcagtgtcggatccacgggtgcagcatcaaag

SEQ ID NO: 2317 - RNA, 112 nt, synthetic construct
  misc_feature 1..112: note = scaffold variant
  source 1..112: mol_type = other RNA
actggcgcttttatctgattactttgagagccatcaccagcgactatgtcgtagtgggtaaagctgcacggaatccattgcactccggatttcactaggtgcagcatcaaag

SEQ ID NO: 2318 - RNA, 103 nt, synthetic construct
  misc_feature 1..103: note = scaffold variant
  source 1..103: mol_type = other RNA
actggcgcttttatctgattactttgagagccatcaccagcgactatgtcgtagtgggtaaagctgcacatgcatgtctaagacagcatgtgcagcatcaaag

SEQ ID NO: 2319 - RNA, 106 nt, synthetic construct
  misc_feature 1..106: note = scaffold variant
  source 1..106: mol_type = other RNA
actggcgcttttatctgattactttgagagccatcaccagcgactatgtcgtagtgggtaaagctgcacaaaacataaggaaaacctatgttgtgcagcatcaaag

SEQ ID NO: 2320 - RNA, 153 nt, synthetic construct
  misc_feature 1..153: note = scaffold variant
  source 1..153: mol_type = other RNA
actggcgcttctatctgattactctgagcgccatcaccagcgactatgtcgtagtgggtaaagccgcttacggactatgggcgcagcgtcaatgacgctgacggtacaggccagacaattattgtctggtatagtccgtaagaggcatcagag

SEQ ID NO: 2321 - RNA, 147 nt, synthetic construct
  misc_feature 1..147: note = scaffold variant
  source 1..147: mol_type = other RNA
actggcgcttctatctgattactctgagcgccatcaccagcgactatgtcgtagtgggtaaagccgcttacgggtgggcgcagcgtcaatgacgctgacggtacaggccagacaattattgtctggtacccgtaagaggcatcagag

SEQ ID NO: 2322 - RNA, 153 nt, synthetic construct
  misc_feature 1..153: note = scaffold variant
  source 1..153: mol_type = other RNA
actggcgcttctatctgattactctgagcgccatcaccagcgactatgtcgtagtgggtaaagccgcttacggtatgggcgcagcgtcaatgacgctgacggtacaggccacatgaggatcacccatgtggtataccgtaagaggcatcagag

SEQ ID NO: 2323 - RNA, 143 nt, synthetic construct
  misc_feature 1..143: note = scaffold variant
  source 1..143: mol_type = other RNA
actggcgcttttatctgattactttgagagccatcaccagcgactatgtcgtagtgggtaaagctccctatgggcgcagcgtcaatgacgctgacggtacaggccacatgaggatcacccatgtggtatagggagcatcaaag

SEQ ID NO: 2324 - RNA, 163 nt, synthetic construct
  misc_feature 1..163: note = scaffold variant
  source 1..163: mol_type = other RNA
actggcgcttctatctgattactctgagcgccatcaccagcgactatgtcgtagtgggtaaagccgcttacggtatgggcgcagctcatgaggatcacccatgagctgacggtacaggccacatgaggatcacccatgtggtataccgtaagaggcatcagag

SEQ ID NO: 2325 - RNA, 153 nt, synthetic construct
  misc_feature 1..153: note = scaffold variant
  source 1..153: mol_type = other RNA
actggcgcttttatctgattactttgagagccatcaccagcgactatgtcgtagtgggtaaagctccctatgggcgcagctcatgaggatcacccatgagctgacggtacaggccacatgaggatcacccatgtggtatagggagcatcaaag

SEQ ID NO: 2326 - RNA, 159 nt, synthetic construct
  misc_feature 1..159: note = scaffold variant
  source 1..159: mol_type = other RNA
actggcgcttctatctgattactctgagcgccatcaccagcgactatgtcgtagtgggtaaagccgcttacggtatgggcgcagcgtcaatgacgctgacggtacaggccacatggcagtcgtaacgacgcgggtggtataccgtaagaggcatcagag

SEQ ID NO: 2327 - RNA, 149 nt, synthetic construct
  misc_feature 1..149: note = scaffold variant
  source 1..149: mol_type = other RNA
actggcgcttttatctgattactttgagagccatcaccagcgactatgtcgtagtgggtaaagctccctatgggcgcagcgtcaatgacgctgacggtacaggccacatggcagtcgtaacgacgcgggtggtatagggagcatcaaag

SEQ ID NO: 2328 - RNA, 180 nt, synthetic construct
  misc_feature 1..180: note = scaffold variant
  source 1..180: mol_type = other RNA
actggcgcttctatctgattactctgagcgccatcaccagcgactatgtcgtagtgggtaaagccgcttacggtatgggcgcagcaaacatggcagtcctaaggacgcgggttttgctgacggtacaggccacatggcagtcgtaacgacgcgggtggtataccgtaagaggcatcagag

SEQ ID NO: 2329 - RNA, 170 nt, synthetic construct
  misc_feature 1..170: note = scaffold variant
  source 1..170: mol_type = other RNA
actggcgcttttatctgattactttgagagccatcaccagcgactatgtcgtagtgggtaaagctccctatgggcgcagcaaacatggcagtcctaaggacgcgggttttgctgacggtacaggccacatggcagtcgtaacgacgcgggtggtatagggagcatcaaag

SEQ ID NO: 2330 - RNA, 167 nt, synthetic construct
  misc_feature 1..167: note = scaffold variant
  source 1..167: mol_type = other RNA
actggcgcttctatctgattactctgagcgccatcaccagcgactatgtcgtagtgggtaaagccgcttacggtatgggcgcagacatggcagtcgtaacgacgcgggtctgacggtacaggccacatgaggatcacccatgtggtataccgtaagaggcatcagag

SEQ ID NO: 2331 - RNA, 157 nt, synthetic construct
  misc_feature 1..157: note = scaffold variant
  source 1..157: mol_type = other RNA
actggcgcttttatctgattactttgagagccatcaccagcgactatgtcgtagtgggtaaagctccctatgggcgcagacatggcagtcgtaacgacgcgggtctgacggtacaggccacatgaggatcacccatgtggtatagggagcatcaaag

SEQ ID NO: 2332 - RNA, 141 nt, synthetic construct
  misc_feature 1..141: note = scaffold variant
  source 1..141: mol_type = other RNA
actggcgcttttatctgattactttgagagccatcaccagcgactatgtcgtagtgggtaaagctgcactatgggcgcagcgtcaatgacgctgacggtacaggccagacaattattgtctggtatagtgcagcatcaaag

SEQ ID NO: 2333 - protein, 54 aa, synthetic construct
  REGION 1..54: note = CasX domain sequence
EKRINKIRKKLSADNATKPVSRSGPMKTLLVRVMTDDLKKRLEKRRKKPEVMPQ

SEQ ID NO: 2334 - protein, 44 aa, synthetic construct
  REGION 1..44: note = CasX domain sequence
VISNNAANNLRMLLDDYTKMKEAILQVYWQEFKDDHVGLMCKFA

SEQ ID NO: 2335 - protein, 91 aa, synthetic construct
  REGION 1..91: note = CasX domain sequence
QPASKKIDQNKLKPEMDEKGNLTTAGFACSQCGQPLFVYKLEQVSEKGKAYTNYFGRCNVAEHEKLILLAQLKPEKDSDEAVTYSLGKFGQ

SEQ ID NO: 2336 - protein, 141 aa, synthetic construct
  REGION 1..141: note = CasX domain sequence
RALDFYSIHVTKESTHPVKPLAQIAGNRYASGPVGKALSDACMGTIASFLSKYQDIIIEHQKVVKGNQKRLESLRELAGKENLEYPSVTLPPQPHTKEGVDAYNEVIARVRMWVNLNLWQKLKLSRDDAKPLLRLKGFPSF

SEQ ID NO: 2337 - protein, 177 aa, synthetic construct
  REGION 1..177: note = CasX domain sequence
PVVERRENEVDWWNTINEVKKLIDAKRDMGRVFWSGVTAEKRNTILEGYNYLPNENDHKKREGSLENPKKPAKRQFGDLLLYLEKKYAGDWGKVFDEAWERIDKKIAGLTSHIEREEARNAEDAQSKAVLTDWLRAKASFVLERLKEMDEKEFYACEIQLQKWYGDLRGNPFAVEAE

SEQ ID NO: 2338 - protein, 151 aa, synthetic construct
  REGION 1..151: note = CasX domain sequence
NRVVDISGFSIGSDGHSIQYRNLLAWKYLENGKREFYLLMNYGKKGRIRFTDGTDIKKSGKWQGLLYGGGKAKVIDLTFDPDDEQLIILPLAFGTRQGREFIWNDLLSLETGLIKLANGRVIEKTIYNKKIGRDEPALFVALTFERREVVD

SEQ ID NO: 2339 - protein, 164 aa, synthetic construct
  REGION 1..164: note = CasX domain sequence
PSNIKPVNLIGVDRGENIPAVIALTDPEGCPLPEFKDSSGGPTDILRIGEGYKEKQRAIQAAKEVEQRRAGGYSRKFASKSRNLADDMVRNSARDLFYHAVTHDAVLVFENLSRGFGRQGKRTFMTERQYTKMEDWLTAKLAYEGLTSKTYLSKTLAQYTSKTC

SEQ ID NO: 2340 - protein, 110 aa, synthetic construct
  REGION 1..110: note = CasX domain sequence
SNCGFTITTADYDGMLVRLKKTSDGWATTLNNKELKAEGQITYYNRYKRQTVEKELSAELDRLSEESGNNDISKWTKGRRDEALFLLKKRFSHRPVQEQFVCLDCGHEVH

SEQ ID NO: 2341 - protein, 53 aa, synthetic construct
  REGION 1..53: note = CasX domain sequence
ADEQAALNIARSWLFLNSNSTEFKSYKSGKQPFVGAWQAFYKRRLKEVWKPNA

SEQ ID NO: 2342 - protein, 56 aa, synthetic construct
  REGION 1..56: note = CasX domain sequence
QEIKRINKIRRRLVKDSNTKKAGKTGPMKTLLVRVMTPDLRERLENLRKKPENIPQ

SEQ ID NO: 2343 - protein, 44 aa, synthetic construct
  REGION 1..44: note = CasX domain sequence
PISNTSRANLNKLLTDYTEMKKAILHVYWEEFQKDPVGLMSRVA

SEQ ID NO: 2344 - protein, 90 aa, synthetic construct
  REGION 1..90: note = CasX domain sequence
QPAPKNIDQRKLIPVKDGNERLTSSGFACSQCCQPLYVYKLEQVNDKGKPHTNYFGRCNVSEHERLILLSPHKPEANDELVTYSLGKFGQ

SEQ ID NO: 2345 - protein, 141 aa, synthetic construct
  REGION 1..141: note = CasX domain sequence
RALDFYSIHVTRESNHPVKPLEQIGGNSCASGPVGKALSDACMGAVASFLTKYQDIILEHQKVIKKNEKRLANLKDIASANGLAFPKITLPPQPHTKEGIEAYNNVVAQIVIWVNLNLWQKLKIGRDEAKPLQRLKGFPSF

SEQ ID NO: 2346 - protein, 168 aa, synthetic construct
  REGION 1..168: note = CasX domain sequence
PLVERQANEVDWWDMVCNVKKLINEKKEDGKVFWQNLAGYKRQEALLPYLSSEEDRKKGKKFARYQFGDLLLHLEKKHGEDWGKVYDEAWERIDKKVEGLSKHIKLEEERRSEDAQSKAALTDWLRAKASFVIEGLKEADKDEFCRCELKLQKWYGDLRGKPFAIEAE

SEQ ID NO: 2347 - protein, 146 aa, synthetic construct
  REGION 1..146: note = CasX domain sequence
NSILDISGFSKQYNCAFIWQKDGVKKLNLYLIINYFKGGKLRFKKIKPEAFEANRFYTVINKKSGEIVPMEVNFNFDDPNLIILPLAFGKRQGREFIWNDLLSLETGSLKLANGRVIEKTLYNRRTRQDEPALFVALTFERREVLD

SEQ ID NO: 2348 - protein, 164 aa, synthetic construct
  REGION 1..164: note = CasX domain sequence
SSNIKPMNLIGIDRGENIPAVIALTDPEGCPLSRFKDSLGNPTHILRIGESYKEKQRTIQAAKEVEQRRAGGYSRKYASKAKNLADDMVRNTARDLLYYAVTQDAMLIFENLSRGFGRQGKRTFMAERQYTRMEDWLTAKLAYEGLPSKTYLSKTLAQYTSKTC

SEQ ID NO: 2349 - protein, 110 aa, synthetic construct
  REGION 1..110: note = CasX domain sequence
SNCGFTITSADYDRVLEKLKKTATGWMTTINGKELKVEGQITYYNRYKRQNVVKDLSVELDRLSEESVNNDISSWTKGRSGEALSLLKKRFSHRPVQEKFVCLNCGFETH

SEQ ID NO: 2350 - protein, 58 aa, synthetic construct
  REGION 1..58: note = CasX domain sequence
ADEQAALNIARSWLFLRSQEYKKYQTNKTTGNTDKRAFVETWQSFYRKKLKEVWKPAV

SEQ ID NO: 2351 - protein, 168 aa, synthetic construct
  REGION 1..168: note = CasX domain sequence
PLVERQANEVDWWDMVCNVKKLINEKKEDGKVFWQNLAGYKRQEALRPYLSSEEDRKKGKKFARYQLGDLLLHLEKKHGEDWGKVYDEAWERIDKKVEGLSKHIKLEEERRSEDAQSKAALTDWLRAKASFVIEGLKEADKDEFCRCELKLQKWYGDLRGKPFAIEAE

SEQ ID NO: 2352 - protein, 164 aa, synthetic construct
  REGION 1..164: note = CasX domain sequence
SSNIKPMNLIGVDRGENIPAVIALTDPEGCPLSRFKDSLGNPTHILRIGESYKEKQRTIQAKKEVEQRRAGGYSRKYASKAKNLADDMVRNTARDLLYYAVTQDAMLIFENLSRGFGRQGKRTFMAERQYTRMEDWLTAKLAYEGLPSKTYLSKTLAQYTSKTC

SEQ ID NO: 2353 - RNA, 155 nt, synthetic construct
  misc_feature 1..155: note = scaffold variant
  source 1..155: mol_type = other RNA
actggcgcttttatctgattactttgagagccatcaccagcgactatgtcgtagtgggtaaagctgcactatgggcgcagcacctgaggatcacccaggtgctgacggtacaggccacctgaggatcacccaggtggtatagtgcagcatcaaag

SEQ ID NO: 2354 - RNA, 155 nt, synthetic construct
  misc_feature 1..155: note = scaffold variant
  source 1..155: mol_type = other RNA
actggcgcttttatctgattactttgagagccatcaccagcgactatgtcgtagtgggtaaagctgcactatgggcgcagcgcatgaggatcacccatgcgctgacggtacaggccgcatgaggatcacccatgcggtatagtgcagcatcaaag

SEQ ID NO: 2355 - RNA, 155 nt, synthetic construct
  misc_feature 1..155: note = scaffold variant
  source 1..155: mol_type = other RNA
actggcgcttttatctgattactttgagagccatcaccagcgactatgtcgtagtgggtaaagctgcactatgggcgcagcgcctgaggatcacccaggcgctgacggtacaggccgcctgaggatcacccaggcggtatagtgcagcatcaaag

SEQ ID NO: 2356 - RNA, 155 nt, synthetic construct
  misc_feature 1..155: note = scaffold variant
  source 1..155: mol_type = other RNA
actggcgcttttatctgattactttgagagccatcaccagcgactatgtcgtagtgggtaaagctgcactatgggcgcagcgcctgagcatcagccaggcgctgacggtacaggccgcctgagcatcagccaggcggtatagtgcagcatcaaag

SEQ ID NO: 2357 - RNA, 155 nt, synthetic construct
  misc_feature 1..155: note = scaffold variant
  source 1..155: mol_type = other RNA
actggcgcttttatctgattactttgagagccatcaccagcgactatgtcgtagtgggtaaagctgcactatgggcgcagcacatgagcatcagccatgtgctgacggtacaggccacatgagcatcagccatgtggtatagtgcagcatcaaag

SEQ ID NO: 2358 - RNA, 155 nt, synthetic construct
  misc_feature 1..155: note = scaffold variant
  source 1..155: mol_type = other RNA
actggcgcttttatctgattactttgagagccatcaccagcgactatgtcgtagtgggtaaagctgcactatgggcgcagcacatgagtatcaaccatgtgctgacggtacaggccacatgagtatcaaccatgtggtatagtgcagcatcaaag

SEQ ID NO: 2359 - RNA, 155 nt, synthetic construct
  misc_feature 1..155: note = scaffold variant
  source 1..155: mol_type = other RNA
actggcgcttttatctgattactttgagagccatcaccagcgactatgtcgtagtgggtaaagctgcactatgggcgcagcacatgagaatcagccatgtgctgacggtacaggccacatgagaatcagccatgtggtatagtgcagcatcaaag

SEQ ID NO: 2360 - RNA, 155 nt, synthetic construct
  misc_feature 1..155: note = scaffold variant
  source 1..155: mol_type = other RNA
actggcgcttttatctgattactttgagagccatcaccagcgactatgtcgtagtgggtaaagctgcactatgggcgcagcccttgaggatcacccatgtgctgacggtacaggccccttgaggatcacccatgtggtatagtgcagcatcaaag

SEQ ID NO: 2361 - RNA, 155 nt, synthetic construct
  misc_feature 1..155: note = scaffold variant
  source 1..155: mol_type = other RNA
actggcgcttttatctgattactttgagagccatcaccagcgactatgtcgtagtgggtaaagctgcactatgggcgcagcacttgaggatcacccatgtgctgacggtacaggccacttgaggatcacccatgtggtatagtgcagcatcaaag

SEQ ID NO: 2362 - RNA, 155 nt, synthetic construct
  misc_feature 1..155: note = scaffold variant
  source 1..155: mol_type = other RNA
actggcgcttttatctgattactttgagagccatcaccagcgactatgtcgtagtgggtaaagctgcactatgggcgcagcacctgaggatcacccatgtgctgacggtacaggccacctgaggatcacccatgtggtatagtgcagcatcaaag

SEQ ID NO: 2363 - RNA, 155 nt, synthetic construct
  misc_feature 1..155: note = scaffold variant
  source 1..155: mol_type = other RNA
actggcgcttttatctgattactttgagagccatcaccagcgactatgtcgtagtgggtaaagctgcactatgggcgcagcacatgaggatcacctatgtgctgacggtacaggccacatgaggatcacctatgtggtatagtgcagcatcaaag

SEQ ID NO: 2364 - RNA, 155 nt, synthetic construct
  misc_feature 1..155: note = scaffold variant
  source 1..155: mol_type = other RNA
actggcgcttttatctgattactttgagagccatcaccagcgactatgtcgtagtgggtaaagctgcactatgggcgcagcacattaggatcaccaatgtgctgacggtacaggccacattaggatcaccaatgtggtatagtgcagcatcaaag

SEQ ID NO: 2365 - RNA, 155 nt, synthetic construct
  misc_feature 1..155: note = scaffold variant
  source 1..155: mol_type = other RNA
actggcgcttttatctgattactttgagagccatcaccagcgactatgtcgtagtgggtaaagctgcactatgggcgcagcacattaggatcaccgatgtgctgacggtacaggccacattaggatcaccgatgtggtatagtgcagcatcaaag

SEQ ID NO: 2366 - RNA, 155 nt, synthetic construct
  misc_feature 1..155: note = scaffold variant
  source 1..155: mol_type = other RNA
actggcgcttttatctgattactttgagagccatcaccagcgactatgtcgtagtgggtaaagctgcactatgggcgcagcacattaggatcacctatgtgctgacggtacaggccacattaggatcacctatgtggtatagtgcagcatcaaag

SEQ ID NO: 2367 - RNA, 155 nt, synthetic construct
  misc_feature 1..155: note = scaffold variant
  source 1..155: mol_type = other RNA
actggcgcttttatctgattactttgagagccatcaccagcgactatgtcgtagtgggtaaagctgcactatgggcgcagcacatgaggattacccatgtgctgacggtacaggccacatgaggattacccatgtggtatagtgcagcatcaaag

SEQ ID NO: 2368 - RNA, 155 nt, synthetic construct
  misc_feature 1..155: note = scaffold variant
  source 1..155: mol_type = other RNA
actggcgcttttatctgattactttgagagccatcaccagcgactatgtcgtagtgggtaaagctgcactatgggcgcagcacatgaggataacccatgtgctgacggtacaggccacatgaggataacccatgtggtatagtgcagcatcaaag

SEQ ID NO: 2369 - RNA, 155 nt, synthetic construct
  misc_feature 1..155: note = scaffold variant
  source 1..155: mol_type = other RNA
actggcgcttttatctgattactttgagagccatcaccagcgactatgtcgtagtgggtaaagctgcactatgggcgcagcacatgaggatgacccatgtgctgacggtacaggccacatgaggatgacccatgtggtatagtgcagcatcaaag

SEQ ID NO: 2370 - RNA, 155 nt, synthetic construct
  misc_feature 1..155: note = scaffold variant
  source 1..155: mol_type = other RNA
actggcgcttttatctgattactttgagagccatcaccagcgactatgtcgtagtgggtaaagctgcactatgggcgcagcacatgaggaccacccatgtgctgacggtacaggccacatgaggaccacccatgtggtatagtgcagcatcaaag

SEQ ID NO: 2371 - RNA, 155 nt, synthetic construct
  misc_feature 1..155: note = scaffold variant
  source 1..155: mol_type = other RNA
actggcgcttttatctgattactttgagagccatcaccagcgactatgtcgtagtgggtaaagctgcactatgggcgcagcagatgaggatcacccatgggctgacggtacaggccagatgaggatcacccatggggtatagtgcagcatcaaag

SEQ ID NO: 2372 - RNA, 155 nt, synthetic construct
  misc_feature 1..155: note = scaffold variant
  source 1..155: mol_type = other RNA
actggcgcttttatctgattactttgagagccatcaccagcgactatgtcgtagtgggtaaagctgcactatgggcgcagcacatggggatcacccatgtgctgacggtacaggccacatggggatcacccatgtggtatagtgcagcatcaaag

SEQ ID NO: 2373 - RNA, 155 nt, synthetic construct
  misc_feature 1..155: note = scaffold variant
  source 1..155: mol_type = other RNA
actggcgcttttatctgattactttgagagccatcaccagcgactatgtcgtagtgggtaaagctgcactatgggcgcagcacatgaggatcacccatgtgctgacggtacaggccacatgaggatcacccatgtggtatagtgcagcatcaaag

SEQ ID NO: 2374 - RNA, 96 nt, synthetic construct
  misc_feature 1..96: note = scaffold variant
  source 1..96: mol_type = other RNA
actggcgcttttatctgattactttgagagccatcaccagcgactatgtcgtagtgggtaaagctcacctgaggatcacccaggtgagcatcaaag

SEQ ID NO: 2375 - RNA, 96 nt, synthetic construct
  misc_feature 1..96: note = scaffold variant
  source 1..96: mol_type = other RNA
actggcgcttttatctgattactttgagagccatcaccagcgactatgtcgtagtgggtaaagctcgcatgaggatcacccatgcgagcatcaaag

SEQ ID NO: 2376 - RNA, 96 nt, synthetic construct
  misc_feature 1..96: note = scaffold variant
  source 1..96: mol_type = other RNA
actggcgcttttatctgattactttgagagccatcaccagcgactatgtcgtagtgggtaaagctcgcctgaggatcacccaggcgagcatcaaag

SEQ ID NO: 2377 - RNA, 96 nt, synthetic construct
  misc_feature 1..96: note = scaffold variant
  source 1..96: mol_type = other RNA
actggcgcttttatctgattactttgagagccatcaccagcgactatgtcgtagtgggtaaagctcgcctgagcatcagccaggcgagcatcaaag

SEQ ID NO: 2378 - RNA, 96 nt, synthetic construct
  misc_feature 1..96: note = scaffold variant
  source 1..96: mol_type = other RNA
actggcgcttttatctgattactttgagagccatcaccagcgactatgtcgtagtgggtaaagctcacatgagcatcagccatgtgagcatcaaag

SEQ ID NO: 2379 - RNA, 96 nt, synthetic construct
  misc_feature 1..96: note = scaffold variant
  source 1..96: mol_type = other RNA
actggcgcttttatctgattactttgagagccatcaccagcgactatgtcgtagtgggtaaagctcacatgagtatcaaccatgtgagcatcaaag

SEQ ID NO: 2380 - RNA, 96 nt, synthetic construct
  misc_feature 1..96: note = scaffold variant
  source 1..96: mol_type = other RNA
actggcgcttttatctgattactttgagagccatcaccagcgactatgtcgtagtgggtaaagctcacatgagaatcagccatgtgagcatcaaag

SEQ ID NO: 2381 - RNA, 96 nt, synthetic construct
  misc_feature 1..96: note = scaffold variant
  source 1..96: mol_type = other RNA
actggcgcttttatctgattactttgagagccatcaccagcgactatgtcgtagtgggtaaagctcccttgaggatcacccatgtgagcatcaaag

SEQ ID NO: 2382 - RNA, 96 nt, synthetic construct
  misc_feature 1..96: note = scaffold variant
  source 1..96: mol_type = other RNA
actggcgcttttatctgattactttgagagccatcaccagcgactatgtcgtagtgggtaaagctcacttgaggatcacccatgtgagcatcaaag

SEQ ID NO: 2383 - RNA, 96 nt, synthetic construct
  misc_feature 1..96: note = scaffold variant
  source 1..96: mol_type = other RNA
actggcgcttttatctgattactttgagagccatcaccagcgactatgtcgtagtgggtaaagctcacctgaggatcacccatgtgagcatcaaag

SEQ ID NO: 2384 - RNA, 96 nt, synthetic construct
  misc_feature 1..96: note = scaffold variant
  source 1..96: mol_type = other RNA
actggcgcttttatctgattactttgagagccatcaccagcgactatgtcgtagtgggtaaagctcacatgaggatcacctatgtgagcatcaaag

SEQ ID NO: 2385 - RNA, 96 nt, synthetic construct
  misc_feature 1..96: note = scaffold variant
  source 1..96: mol_type = other RNA
actggcgcttttatctgattactttgagagccatcaccagcgactatgtcgtagtgggtaaagctcacattaggatcaccaatgtgagcatcaaag

SEQ ID NO: 2386 - RNA, 96 nt, synthetic construct
  misc_feature 1..96: note = scaffold variant
  source 1..96: mol_type = other RNA
actggcgcttttatctgattactttgagagccatcaccagcgactatgtcgtagtgggtaaagctcacattaggatcaccgatgtgagcatcaaag

SEQ ID NO: 2387 - RNA, 96 nt, synthetic construct
  misc_feature 1..96: note = scaffold variant
  source 1..96: mol_type = other RNA
actggcgcttttatctgattactttgagagccatcaccagcgactatgtcgtagtgggtaaagctcacattaggatcacctatgtgagcatcaaag

SEQ ID NO: 2388 - RNA, 96 nt, synthetic construct
  misc_feature 1..96: note = scaffold variant
  source 1..96: mol_type = other RNA
actggcgcttttatctgattactttgagagccatcaccagcgactatgtcgtagtgggtaaagctcacatgaggattacccatgtgagcatcaaag

SEQ ID NO: 2389 - RNA, 96 nt, synthetic construct
  misc_feature 1..96: note = scaffold variant
  source 1..96: mol_type = other RNA
actggcgcttttatctgattactttgagagccatcaccagcgactatgtcgtagtgggtaaagctcacatgaggataacccatgtgagcatcaaag

SEQ ID NO: 2390 - RNA, 96 nt, synthetic construct
  misc_feature 1..96: note = scaffold variant
  source 1..96: mol_type = other RNA
actggcgcttttatctgattactttgagagccatcaccagcgactatgtcgtagtgggtaaagctcacatgaggatgacccatgtgagcatcaaag

SEQ ID NO: 2391 - RNA, 96 nt, synthetic construct
  misc_feature 1..96: note = scaffold variant
  source 1..96: mol_type = other RNA
actggcgcttttatctgattactttgagagccatcaccagcgactatgtcgtagtgggtaaagctcacatgaggaccacccatgtgagcatcaaag

SEQ ID NO: 2392 - RNA, 96 nt, synthetic construct
  misc_feature 1..96: note = scaffold variant
  source 1..96: mol_type = other RNA
actggcgcttttatctgattactttgagagccatcaccagcgactatgtcgtagtgggtaaagctcagatgaggatcacccatgggagcatcaaag

SEQ ID NO: 2393 - RNA, 96 nt, synthetic construct
  misc_feature 1..96: note = scaffold variant
  source 1..96: mol_type = other RNA
actggcgcttttatctgattactttgagagccatcaccagcgactatgtcgtagtgggtaaagctcacatggggatcacccatgtgagcatcaaag

SEQ ID NO: 2394 - RNA, 96 nt, synthetic construct
  misc_feature 1..96: note = scaffold variant
  source 1..96: mol_type = other RNA
actggcgcttctatctgattactctgagcgccatcaccagcgactatgtcgtagtgggtaaagctcacatgaggatcacccatgtgagcatcagag

SEQ ID NO: 2395 - RNA, 145 nt, synthetic construct
  misc_feature 1..145: note = scaffold variant
  source 1..145: mol_type = other RNA
actggcgcttctatctgattactctgagcgccatcaccagcgactatgtcgtagtgggtaaagctgcactatgggcgcagcgtcaatgacgctgacggtacaggccacatgaggatcacccatgtggtatagtgcagcatcagag

SEQ ID NO: 2396 - RNA, 155 nt, synthetic construct
  misc_feature 1..155: note = scaffold variant
  source 1..155: mol_type = other RNA
actggcgcttctatctgattactctgagcgccatcaccagcgactatgtcgtagtgggtaaagctgcactatgggcgcagctcatgaggatcacccatgagctgacggtacaggccacatgaggatcacccatgtggtatagtgcagcatcagag

SEQ ID NO: 2397 - RNA, 159 nt, synthetic construct
  misc_feature 1..159: note = scaffold variant
  source 1..159: mol_type = other RNA
actggcgcttctatctgattactctgagcgccatcaccagcgactatgtcgtagtgggtaaagctgcactatgggcgcagacatggcagtcgtaacgacgcgggtctgacggtacaggccacatgaggatcacccatgtggtatagtgcagcatcagag

SEQ ID NO: 2398 - RNA, 145 nt, synthetic construct
  misc_feature 1..145: note = scaffold variant
  source 1..145: mol_type = other RNA
actggcgcttttatctgattactttgagagccatcaccagcgactatgtcgtagtgggtaaagctgcactatggggccacatgaggatcacccatgtggtgtacagcgcagcgtcaatgacgctgacgatagtgcagcatcaaag

What is claimed is:

1. A guide ribonucleic acid (gRNA) comprising a sequence selected from the group consisting of SEQ ID NOS: 2292, 2291, 2307, 2281-2290, 2293-2306, 2308-2332 and 2353-2398, or a sequence having at least 70% sequence identity thereto.

2. A guide ribonucleic acid (gRNA) comprising a sequence with at least 70% identity to the sequence of SEQ ID NO: 2239, wherein the sequence comprises modifications at positions of C9, U11, U24, A29, U54, G64, A88, and A95 relative to SEQ ID NO: 2239.

3. The gRNA of claim 2, wherein the modifications relative to the sequence of SEQ ID NO: 2239 comprise one or more of C9U, U11C, C17G, U24C, A29C, an insertion of G at position 54, an insertion of C at position 64, A88G, or A95G.

4. The gRNA of claim 3, wherein the gRNA comprises:
i. an insertion of C at position 64 and a substitution of A88G in an extended stem loop sequence;
ii. a substitution of U11C, U24C, and A95G in a triplex sequence; and/or
iii. a substitution of A29C in a pseudoknot sequence.

5. The gRNA of claim 2, wherein the gRNA comprises the modifications of C9U, U11C, C17G, U24C, A29C, an insertion of G at position 54, an insertion of C at position 64, A88G, and A95G.

6. The gRNA of claim 2, wherein the gRNA comprises an extended stem loop comprising one or more heterologous RNA sequences in the extended stem loop, and wherein the one or more heterologous RNA sequences are capable of binding a protein, an RNA, a DNA, or a small molecule.

7. The gRNA of claim 6, wherein the one or more heterologous RNAs sequence are selected from the group consisting of an MS2 hairpin, a QP hairpin, a U1 hairpin II, and a PP7 stem loop, or variants thereof.

8. The gRNA of claim 6, wherein the one or more heterologous RNAs sequences comprises a Rev response element (RRE) or a portion thereof.

9. The gRNA of claim 8, wherein the RRE or portion thereof is selected from the group consisting of a Stem IIB of the RRE having the sequence UGGGCGCAGCGUCAAUGACGCUGACGGUACA (SEQ ID NO: 1280), a Stem II-V of the RRE having the sequence CAGGAAGCACUAUGGGCGCAGCGUCAAUGACGCUGACGGUACAGGCCA GACAAUUAUUGUCUGGUAUAGUGCAGCAGCAGAACAAUUUGCUGAGGG CUAUUGAGGCGCAACAGCAUCUGUUGCAACUCACAGUCUGGGGCAUCA AGCAGCUCCAGGCAAGAAUCCUG (SEQ ID NO: 1282), a Stem II of the RRE having the sequence GCACUAUGGGCGCAGCGUCAAUGACGCUGACGGUACAGGCCAGACAAU UAUUGUCUGGUAUAGUGC (SEQ ID NO: 1281), a Rev-binding element (RBE) of a Stem IIB of the RRE having the sequence GCUGACGGUACAGGC (SEQ ID NO: 1284), and a full-length RRE having the sequence AGGAGCUUUGUUCCUUGGGUUCUUGGGAGCAGCAGGAAGCACUAUGGG CGCAGCGUCAAUGACGCUGACGGUACAGGCCAGACAAUUAUUGUCUGG UAUAGUGCAGCAGCAGAACAAUUUGCUGAGGGCUAUUGAGGCGCAACA GCAUCUGUUGCAACUCACAGUCUGGGGCAUCAAGCAGCUCCAGGCAAGA AUCCUGGCUGUGGAAAGAUACCUAAAGGAUCAACAGCUCCU (SEQ ID NO: 1283).

10. The gRNA of claim 2, comprising a targeting sequence at the 3′ end complementary to a target nucleic acid sequence, wherein the targeting sequence has 15, 16, 17, 18, 19, 20, 21, or 22 nucleotides.

11. The gRNA of claim 2, wherein the gRNA is chemically modified.

12. The gRNA of claim 2, wherein the gRNA comprises the sequence of SEQ ID NO: 2292.

13. A guide ribonucleic acid (gRNA) comprising the extended stem loop sequence of SEQ ID NO: 1286.

14. The gRNA of claim 13, wherein the gRNA comprises a scaffold stem loop, a triplex, and/or a pseudoknot.

15. The gRNA of claim 14, wherein the gRNA comprises a triplex, and wherein the triplex comprises substitutions at positions U11, U24, and/or A95 relative to the gRNA sequence of SEQ ID NO: 2239.

16. The gRNA of claim 15, wherein the triplex comprises the substitutions of U11C, U24C, and/or A95G relative to the gRNA sequence of SEQ ID NO: 2239.

17. The gRNA of claim 14, wherein the gRNA comprises a pseudoknot, and wherein the pseudoknot stem comprises a substitution at position A29 relative to the gRNA sequence of SEQ ID NO: 2239.

18. The gRNA of claim 17, wherein the gRNA comprises a pseudoknot, wherein the pseudoknot comprises the substitution of A29C relative to the gRNA sequence of SEQ ID NO: 2239.

19. The gRNA of claim 13, comprising a targeting sequence at the 3′ end complementary to a target nucleic acid sequence.

20. The gRNA of claim 13, wherein the gRNA comprises the sequence of SEQ ID NO: 2292, or a sequence with at least 70% sequence identity thereto.

21. A guide ribonucleic acid (gRNA) comprising an extended stem loop sequence, wherein the extended stem loop sequence comprises an insertion at position 3 of the extended stem loop sequence and/or a substitution at position −3 relative to the sequence of SEQ ID NO: 1285 as set forth in FIG. 46.

22. The gRNA of claim 21, wherein the extended stem loop comprises an insertion of a C at position 3 and/or a substitution of A[−3]G.

23. The gRNA of claim 21, wherein the gRNA comprises a scaffold stem loop, a triplex, and/or a pseudoknot.

24. The gRNA of claim 23, wherein the gRNA comprises a triplex, and wherein the triplex comprises substitutions at positions U11, U24, and/or A95 relative to the gRNA sequence of SEQ ID NO: 2239.

25. The gRNA of claim 24, wherein the triplex comprises the substitutions of U11C, U24C, and/or A95G relative to the gRNA sequence of SEQ ID NO: 2239.

26. The gRNA of claim 23, wherein the gRNA comprises a pseudoknot stem, and wherein the pseudoknot comprises substitutions at positions A29 relative to the gRNA sequence of SEQ ID NO: 2239.

27. The gRNA of claim 21, wherein the gRNA comprises a pseudoknot, wherein the pseudoknot comprises the substitution of A29C relative to the gRNA sequence of SEQ ID NO: 2239.

28. The gRNA of claim 21, wherein the gRNA comprises a sequence with at least 70% sequence identity to the gRNA sequence of SEQ ID NO: 2292.

29. The gRNA of claim 21, comprising a targeting sequence at the 3′ end that is complementary to a target nucleic acid sequence.

30. The gRNA of claim 21, wherein the gRNA is chemically modified.
